(19) United States
(12) Patent Application Publication
(10) Pub. No.: US 2024/0230663 A1
(43) Pub. Date: Jul. 11, 2024

(54) METHODS, COMPOSITIONS, AND SYSTEMS FOR PROFILING OR PREDICTING AN IMMUNE RESPONSE

(71) Applicants: Avail Bio, Inc., San Francisco, CA (US); THE REGENTS OF THE UNIVERSITY OF CALIFORNIA, Oakland, CA (US); CHAN ZUCKERBERG BIOHUB, INC., San Francisco, CA (US)

(72) Inventors: Clinton L. CARIO, San Francisco, CA (US); Nima C. EMAMI, San Francisco, CA (US); John S. WITTE, San Francisco, CA (US); Joseph L. DERISI, San Francisco, CA (US)

(21) Appl. No.: 17/689,833

(22) Filed: Mar. 8, 2022

Related U.S. Application Data
(63) Continuation of application No. PCT/US20/49563, filed on Sep. 4, 2020.
(60) Provisional application No. 62/896,457, filed on Sep. 5, 2019.

(51) Int. Cl. G01N 33/68; G01N 33/58

(52) U.S. Cl. CPC G01N 33/6854; G01N 33/58; G01N 2800/52

(57) ABSTRACT

The present disclosure provides methods, systems, compositions relating to developing an antibody repertoire of an immune response. The methods may comprise using an epitope of a non-wild type antigen to identify an antibody from a sample of a subject exhibiting said immune response. The methods, systems and compositions may use an identified antibody to generate an antibody repertoire. The method may be used to monitor an immune response to a drug or biologic, and to ascertain a therapeutic target or molecule.

### CROSS-REFERENCE

[0001] This application is a continuation of International Patent Application No. PCT/US20/49563, filed on Sep. 4, 2020, claims the benefit of U.S. Provisional Application 62/896,457, entitled “METHODS, COMPOSITIONS, AND SYSTEMS FOR PROFILING OR PREDICTING IMMUNE RESPONSE”, filed on Sep. 5, 2019, which is incorporated by reference herein in its entirety.

### SEQUENCE LISTING

[0002] The instant application contains a Sequence Listing which has been submitted electronically in ASCII format and is hereby incorporated by reference in its entirety. Said ASCII copy, created on Sep. 27, 2022, is named 55240-702_301_SL.txt and is 873,983 bytes in size.

### BACKGROUND

[0003] While advances in T cell biology, and specifically in our understanding of the CTLA-4 and PD-1/PD-L1 pathways, have enabled a new generation of cancer immunotherapeutics, recent findings have implicated an overlooked cellular subtype in the anti-tumorigenic process of the adaptive immune response: B cells. Most notable for their production and secretion of antibodies, B cells and their plasma cell progeny have recently been identified by several independent studies to form tertiary lymphoid structures in a tumor-adjacent context, which have been associated with favorable responses to immune checkpoint inhibitor treatment by cancer patients. Furthermore, circulating antibodies have been well characterized as causal or correlative markers of immune-related pathogenesis or toxicity in patients with diverse immune-related diseases, including cancer, autoimmune, and neurodegenerative diseases.

### SUMMARY

[0004] In contrast to the complexity of T cell recognition of neoantigens by T cell receptors (TCR), and the extenuating hyperdiversity of major histocompatibility complex (MHC) encoded by human leukocyte antigen (HLA), the relative simplicity of the lock-and-key antibody mechanism of immune recognition by B cells and plasma cells presents an opportunity to better characterize the immune response against the non-wild type protein sequences induced by cancer and other human diseases. However, existing immunoassay technologies (such as enzyme-linked immunosorbent assay or ELISA, protein microarray, and peptide display NGS-based immunoassay) have thus far failed to capture the immune responses of B cell and antibody repertoires against non-wild type targets. Although the nature of these non-wild type immune responses has the potential to unlock an entirely new class of B cells and antibodies with therapeutic and diagnostic applications, the development of the appropriate immunoassay technology to capture this novel compartment of adaptive immune activity has been limited by the availability of multi-omic data, bioinformatic methodology, and a sufficiently sensitive and flexible immunoassay technology format. Yet, advances in bioinformatics, synthetic biology, and genomic sequencing have today enabled a new class of NGS immunoassays to capture the immune response against the vast universe of putative non-wild type antigens and epitopes introduced by cancer and other diseases, with an opportunity to harness their biological and clinical relevance for precision medicine.

[0005] Accordingly, there is a need for tools to better characterize B-cell responses to non-wild-type antigen.

[0006] Described herein is a proteomic technology for capturing the immune response against non-wild type antigens. Sequences of non-wild type proteins characteristic of human disease genetics are bioinformatically designed, synthesized as DNA oligonucleotides, and expressed in a peptide display system such as a bacteriophage (“phage”) display vector. The resultant library expresses putatively antigenic non-wild type protein peptide targets, and allows phenotype (i.e. the expression of a particular protein or peptide on a bacteriophage capsid) to be linked to a specific genotype (i.e., the DNA “barcode” carried inside the phage that uniquely encodes the target identity). The engineered peptide display system empowers the capture and characterization of an antibody repertoire that specifically targets the universe of somatic aberrations that arise in diseased cells and tissues, and an NGS-based immunoassay of the DNA barcodes encoding the surface expressed peptides unlocks knowledge of non-wild type targets of this antibody repertoire. The inventors successfully detail said immunoassay technology, including the design principles for, and composition of, diverse libraries of non-wild type antigenic content for use in such a system. This design methodology and immunoassay technology uniquely enables the detection of antibody responses against de novo somatic mutations in diseases such as cancer, unlocking novel antigenic targets and therapeutic molecules for applications including, but not limited to, therapeutic target discovery, therapeutic development, and precision medicine. Hence, we provide peptide display design methodology, screening libraries, and immunoassay techniques with utility including, but not limited to, designing and implementing libraries expressing non-wild type antigenic targets in disease, detecting an immune response against a non-wild type antigenic target, methods for monitoring and predicting an immune response in a patient exhibiting said immune response, and methods for novel therapeutic target discovery and therapeutic asset development.

[0007] In some aspects, the present disclosure provides for a method for detecting an antibody, comprising: (a) contacting a sample from a subject with a peptide display library under conditions sufficient to permit binding of an antibody from said sample to a non-wild type antigen within said peptide display library to yield a complex comprising said non-wild type antigen coupled to said antibody; (b) identifying said non-wild type antigen; and (c) said non-wild type antigen identified in (b) to identify said antibody. In some embodiments, said non-wild type antigen comprises a nucleic acid barcode sequence specific to said non-wild type antigen. In some embodiments, said nucleic acid barcode sequence uniquely identifies said non-wild type antigen. In some embodiments, the method further comprises subjecting said complex to nucleic acid amplification under conditions sufficient to amplify said nucleic acid barcode sequence to yield an amplified complex comprising a sequence that is homologous or complementary to said nucleic acid barcode sequence. In some embodiments, the method further comprises determining said sequence of said amplified complex. In some embodiments, the method further comprises using said sequence of said amplified complex to generate said antibody repertoire. In some embodiments, said peptide display library further comprises a wild type epitope of an antibody. In some embodiments, said non-wild type epitope is selected from a peptide variant of a wild-type protein selected from the group consisting of a somatic single amino acid substitution variant, a insertion-deletion variant, a structural variant such as a gene fusion or splice junction variant, and a frameshifted protein sequence induced downstream of a missense mutation. In some embodiments, said subject has been treated with a therapeutic prior to (a). In some embodiments, said therapeutic is a cancer therapeutic. In some embodiments, said therapeutic is an immunotherapy. In some embodiments, said subject has received treatment selected from the group consisting of a PD-1 inhibitor, a PD-L1 inhibitor, and a CTLA-4 inhibitor. In some embodiments, said subject has received treatment, wherein said treatment comprises Tumor-Associated Antigen (TAA)-targeted therapy, a SEREX antigen-targeted therapy, a Neoantigen-targeted therapy, or a biologic or small molecule therapy targeted against CD19, HER2, STAT3, IDO, NY-ESO-1, CD40, CSF1R, BCMA, MUC1, ADORA2A, CD20, GD2, TLR7, WT1, IFNAR1, CD47, EGFR, LAG-3, OX40, PSMA, Mesothelin, TERT, TLR, TLR9, 4-1BB, IL2R, TLR4, CD33, GITR, HPV E6, Survivin, CD123, TIGIT, TIM-3, CD73, HPV E7, TLR3, CD38, EBV, STING, CD22, GPC3, HDAC1, CXCR4, GMCSFR, CD30, CEACAM5, HDAC6, HPV, CD3, MAGE-A3, TNF, PSA, CD25, CEA, EPCAM, CMV, IL12, PRAME, IL12R, 5T4, Beta Catenin, CCR2, PMEL, CXCL12, IGF1, CD46, CXCR1, GMCSF, IL15R, ROR1, TGFBR2, CCR4, FLT-3, FOLR1, GCSFR, ICOS, JAK2, KRAS, VISTA, CD133, CD27, CD39, CEACAM6, NKG2D, STAT5, TGFB1, TLR2, USP7, ANG1, ANG2, B7-H3, CLEC12A, IL13RA2, RIG-1, TRP2, VEGF, AFP, Alpha-Gal, COX-2, EPHA2, gp96, MUC16, p53, TGF-β, CD138, CDwl36, CS1, CXCR2, EGFRvIII, E3 Ligase, Ubiquitin Ligase, Gelactin-3, Globo H, GR, IFNAR2, IFNGR1, IL6, JAK1, MLANA, RAS, SLAMF7, TDO, TGFB2, TLR8, ALK, Arginase, CCR1, CD56, CD70, FAP, GD3, IDH1, IL6R, IRAK4, MAGE-A4, MERTK, MIF, PSCA, PTGER4, SIRPA, TGFB, TGFBR1, ACPP, ADORA2B, AR, Brachyury, CA19-9, CD32, CEACAM1, Gastrin, HDAC, HPV L2, IFNAR, IFNGR, IGF1R, IGF2, IL15, IL17R, IL1B, IL7R, JAK, MAGE-A, MAGE-A1, MAGE-A6, P38, RORC, TLR5, VEGFR2, ADORA3, ATRT, B7-H4, c-KIT, CCR7, CD11b, CD135, CD171, CD174, CDH3, CX3CR1, Gelactin-1, GM3, HLA-A2, HSP70, IL10, IL17, IL2RB, JAK3, MDA5, NKG2A, PBF, PVRIG, SPAM1, URLC10, VEGFR1, ABCB5, ADABP, ADAM17, ADP, AEG1, Alpha-lactalbumin, AMHR2, Angiogenesis, ASPH, AXL, BCL2, BTE6-LX-8b, BTE6-X-15-7, Carbohydrate Antigen, CCL20, CCL3, CCNB1, CD147, CD155, CD16, CD162, CD16a, CD200, CD21, CD28, CD44, CD52, CD54, CD7, CD80, CD88, Claudin 18, cMET, COX2, CSF1, CTCFL, CXCR5, CXCR7, ElA, EIF2AK3, ERG, FGF2, FN1, GC, GM2, gpA33, HBV, Hemagglutinin, HER3, HILPDA, HLA-DR, HMW-MAA, HP59, HPV 16, HPV E6/7, HPV L1, HSP105, HSP65, HVEM, Hyaluronan, IL13RA1, IL2, IL21R, ILDR2, IL8, KIF20A, KIR2DL1, KIR2DL3, LXR, MAGE-A10, MAGE-C2, Mammaglobin A, MAPK, MICA, MiHA, MMP-11, MVP, Myeloblastin, N-Myc, NKp46, NLRP3, NR2F6, Oncofetal Antigen, P2RX7, RhoC, SIM-2, SSTR2, SSX2, STAT1, STn, TAG72, TAMA, TFDP3, TGFBR, TSA, TYK2, Tyrosinase, VEGFA, Ecto 5′ Nucleotidase, CD73, NTSE, ADAM9, Adenosine, AIM2, B7-H6, BAFF-R, BAI1, BARD1, BOB-1, CA9, Cancer Testis Antigen (CTA), CB2, CBLB, CCR9, CD13, CD130, CD150, CD160, CD200R1, CD267, CD29, CD3E, CD4, CD51, CD8, Claudin 6, CLEC2D, COX, COX-1, CPEB4, CPEG4, CRBN, CRLF2, CSPG4, CTA, CXCL1, CXCR3, Cytosine Deaminase, DCK, DKK1, DLL3, DR3, DR5, EBNA3C, EGF, EGFR5, ELVAL4, EPHA3, EPS8, EVI1, FAIM-3, FasR, FCU1, FLT3, FOLR, FOXM1, FSHR, Galectin-3, GalNAc, GARP, Gelactin-9, Gelatcin-1/3/9, GLD18, GNRHR, GP160, GP73, H3.3K27M, HAGE, HDAC2, HDAC8, HPV16 E6, HPV16 E7, HSP, Hypoxia Pathway, ICAM, ICAM7, IDO1, IFNG, IFNGR2, IGF2R, IGFBP2, IGK@, IL10RA, IL12RB1, IL13, IL13R, IL13Ralpha2, IL15RA, IL17A, IL17B, IL18, ILlA, IL1R1, IL1R3, IL21, IL22R, IL27R, IL2RA, IL35, IL9R, Integrin Beta-7, IRAK1, ITGB5, Kappa Myeloma Antigen, KIR2DL2, Kynurenine, LlCAM, Lambda Myeloma Antigen, LAMP, LLO, LXRA, LXRB, Mas Receptor, MG7, MHCI, MHCII, MIC, MOSPD2, MRP-3, MRP1, MRP3765, muGNTP01, MYB, MYBL2, NFAT, NGcGM3, Nrf2, p38 MAP Kinase, P55, PAM4, PAP, PASD1, PCDH18, PD-L2, PI3K-delta, POTE, PPT, Protein Tolemerase, PTGER2, RANKL, RBL001, RNF43, ROR2, S100A9, SEREX Antigen, SLAMF1, STAT, TACSTD2, TASTD2, TDO2, TEM, Thymidine Kinase, Thymidylate Synthase, TIE2, TIMP3, TM4SF5, TOP1, TRBC1, TRBC2, TRIF, Tryptophan, TSHR, TWEAK, UTA2-1, VDBP, VRP, VSIG-4, XAGE1, XAGE1A, ZP1, or ZP3. In some embodiments, said subject has received treatment, wherein said treatment comprises a cell therapy, a cancer vaccine, a monoclonal antibody, an antibody-drug conjugate, a tumor infiltrating cell therapy, a chimeric antigen receptor cell therapy, a polyspecific antibody, an organoid, a targeted therapy, an immunotherapy, surgery, a radiotherapy, a chemotherapy, or a stem cell therapy. In some embodiments, said peptide display library comprises a sequence corresponding to at least 10, at least 20, at least 30, at least 40, or at least 50 consecutive amino acids at least one, at least 5, at least 10, at least 20, at least 50, at least 100, at least 200, at least 300, at least 400, at least 500, at least 600, at least 700, at least 800, at least 900, at least 1000, at least 1100, at least 1200, at least 1300, at least 1400, at least 1500, at least 1600, at least 700, or all of the sequences selected from SEQ ID NOs: 1-1752 or a variant thereof. In some embodiments, said peptide display library comprises greater than or equal to about 10, about 50, about 100, about 500, about 1000, about 1500, about 1700, about 2000, about 5000, about 7000, about 10,000, about 15,000 about 25,000, about 50,000, about 75,000, about 100,000, about 200,000, about 300,000, about 400,000, or about 500,000 or more peptide epitopes.

[0008] In some aspects, the present disclosure provides for a method of treating or monitoring a subject having or suspected of having a disease, comprising: (a) contacting a sample of a subject with a peptide display library comprising a plurality of non-wild type epitopes of antibodies under conditions sufficient to form a complex comprising an antibody from said sample bound to a non-wild type epitope of an antibody from said plurality of non-wild type epitopes of antibodies; (b) identifying said non-wild type epitope of said antibody; and (c) using said non-wild type epitope of said antibody identified in (b) to generate an output, or quantify an immune potential, indicative of (i) a diagnosis of said disease, (ii) a predicted response of said subject to a therapeutic for said disease, (iii) a progression or regression of said disease in response to said subject having received said therapeutic, or (iv) autoimmune toxicity or an immune related adverse event in response to said subject having received said therapeutic. In some embodiments, the method further comprises comparing said non-wild type epitope of said antibody identified in (b) against an antibody repertoire of an immune response to generate said output or outputs. In some embodiments, said disease is a non-viral disease. In some embodiments, said subject has said disease, and wherein said disease is cancer. In some embodiments, said cancer is selected from the group consisting of an anaplastic cancer, medullary thyroid cancer, appendiceal cancer, arrhenoblastoma, biliary tract carcinoma, B-cell lymphoma, bladder cancer, breast cancer, cancers of the bile duct, carcinoid tumor, cervical cancer, cholangiocarcinoma, colon cancer, colorectal cancer, craniopharyngioma, endometrial cancer, epithelial intraperitoneal malignancy with malignant ascites, esophageal cancer, Ewing sarcoma, fallopian tube cancer, follicular cancer, gall bladder cancer, gastric cancer, gastrointestinal stromal tumor (GIST), GE-junction cancer, genito-urinary tract cancer, glioma, glioblastoma, head and neck cancer, head and neck squamous cell carcinoma, hepatoblastoma, hepatocarcinoma, hepatocellular carcinoma, Hodgkin lymphoma, non-Hodgkin lymphoma, HR+ and HER2+ breast cancer, Hurthle cell cancer, Inflammatory breast cancer, Kaposi sarcoma, kidney cancer, laryngeal cancer, liposarcoma, liver cancer, lung cancer, medulloblastoma, melanoma, Merkel cell carcinoma, microsatellite instability high or DNA mismatch repair deficient solid tumors, neuroblastoma, neuroblastoma, neuroendocrine cancer, non-small cell lung cancer, osteosarcoma (bone cancer), ovarian cancer, ovarian cancer with malignant ascites, pancreatic cancer, pancreatic neuroendocrine tumor, papillary cancer, parathyroid cancer, peritoneal carcinomatosis, peritoneal mesothelioma, primitive neuroectodermal tumor, prostate cancer, renal cell carcinoma, retinoblastoma, rhabdomyosarcoma, salivary gland carcinoma, sarcoma, skin cancer, small cell lung cancer, non-small cell lung cancer, mall intestine cancer, stomach cancer, testicular cancer, thyroid cancer, triple negative breast cancer, urothelial cancer, uterine cancer, uterine serous carcinoma, vaginal cancer, vulvar cancer, and Wilms tumor. In some embodiments, said cancer is selected from the group consisting of melanoma, B-cell lymphoma, non-small cell lung cancer, bladder cancer, head and neck squamous cell carcinoma, hepatocellular carcinoma, Hodgkin lymphoma, Merkel cell carcinoma, and microsatellite instability high or DNA mismatch repair deficient solid tumors. In some embodiments, the method further comprises subjecting said complex to nucleic acid amplification under conditions sufficient to amplify said complex to yield an amplified complex. In some embodiments, the method further comprises determining a sequence of said amplified complex. In some embodiments, the method further comprises comparing said sequence of said amplified complex with an antibody repertoire of said therapeutic to generate said output, or quantify an immune potential, indicative of (i) a diagnosis of said disease, (ii) a predicted response of said subject to said therapeutic for said disease, (iii) a progression or regression of said disease in response to said subject having received said therapeutic, or (iv) autoimmune toxicity or immune related adverse events in response to said subject with said disease having received said therapeutic. In some embodiments, said non-wild type epitope of said antibody comprises a peptide variant of a wild-type protein selected from the group consisting of a somatic single amino acid substitution variant, an insertion-deletion variant, a structural variant such as a gene fusions or splice junction variant, and a frameshifted protein sequence induced downstream of a missense mutation. In some embodiments, said therapeutic is a cancer therapeutic. In some embodiments, said therapeutic is an immunotherapy. In some embodiments, a predicted response of said subject to said therapeutic for said disease is within a tissue of said subject. In some embodiments, a predicted response of said subject to said therapeutic for said disease is with within an organ of said subject. In some embodiments, said peptide display library comprises a sequence corresponding to at least 10, at least 20, at least 30, at least 40, or at least 50 consecutive amino acids at least one, at least 5, at least 10, at least 20, at least 50, at least 100, at least 200, at least 300, at least 400, at least 500, at least 600, at least 700, at least 800, at least 900, at least 1000, at least 1100, at least 1200, at least 1300, at least 1400, at least 1500, at least 1600, at least 700, or all of the sequences selected from SEQ ID NOs: 1-1752 or a variant thereof. In some embodiments, said peptide display library comprises greater than or equal to about 10, about 50, about 100, about 500, about 1000, about 1500, about 1700, about 2000, about 5000, about 7000, about 10,000, about 15,000 about 25,000, about 50,000, about 75,000, about 100,000, about 200,000, about 300,000, about 400,000, or about 500,000 or more peptide epitopes.

[0009] In some aspects, the present disclosure provides for a method for identifying a target of an antibody in a subject, comprising using an epitope of a non-wild type antigen to identify said target of said antibody in a sample of said subject. In some embodiments, said subject is a human. In some embodiments, said non-wild type antigen is a non-wild type peptide epitope. In some embodiments, the method further comprises contacting said sample of said subject with a peptide display library comprising a plurality of peptide epitopes comprising said non-wild type peptide epitope under conditions sufficient to permit binding of said antibody to said non-wild type peptide epitope to yield a complex comprising said antibody coupled to said non-wild type peptide epitope. In some embodiments, said peptide display library further comprises a wild type peptide epitope of said antibody or another antibody. In some embodiments, said peptide display library comprises a sequence corresponding to at least 10, at least 20, at least 30, at least 40, or at least 50 consecutive amino acids at least one, at least 5, at least 10, at least 20, at least 50, at least 100, at least 200, at least 300, at least 400, at least 500, at least 600, at least 700, at least 800, at least 900, at least 1000, at least 1100, at least 1200, at least 1300, at least 1400, at least 1500, at least 1600, at least 700, or all of the sequences selected from SEQ ID NOs: 1-1752 or a variant thereof. In some embodiments, said peptide display library comprises greater than or equal to about 10, about 50, about 100, about 500, about 1000, about 1500, about 1700, about 2000, about 5000, about 7000, about 10,000, about 15,000 about 25,000, about 50,000, about 75,000, about 100,000, about 200,000, about 300,000, about 400,000, or about 500,000 or more peptide epitopes. In some embodiments, said subject is exhibiting an immune response. In some embodiments, said immune response is a non-pathogen immune response. In some embodiments, said immune response is a non-viral immune response. In some embodiments, said immune response is a non-bacterial immune response. In some embodiments, said immune response is an anti-cancer immune response. In some embodiments, said non-wild type peptide epitope within said plurality of non-wild type peptide epitope of said antibody comprises a unique nucleic acid barcode sequence identifying said non-wild type peptide epitope. In some embodiments, said complex comprises a unique nucleic acid barcode sequence identifying a non-wild type peptide epitope within said plurality of non-wild type peptide epitopes of said antibody and said antibody. In some embodiments, the method further comprises identifying said nucleic acid barcode sequence, thereby identifying said antibody specificity. In some embodiments, said non-wild type peptide epitope comprises a variant sequence of a wild-type protein selected from the group consisting of a somatic single amino acid substitution variant, an insertion-deletion variant, a structural variant such as a gene fusion or splice junction variant, and a frameshifted protein sequence induced downstream of a missense mutation. In some embodiments, said non-wild type epitope comprises a variant sequence of a wild-type protein selected from the group consisting of a structural variants such as a gene fusion or splice junction variant and a frameshifted protein sequence induced downstream of a missense mutation. In some embodiments, said variant is assessed relative to a germline genome of said subject. In some embodiments, said variant is assessed relative to a population average of germline genomes of human subjects. In some embodiments, said immune response is an immune response to a therapeutic. In some embodiments, said therapeutic is a cancer therapeutic. In some embodiments, said therapeutic is an immunotherapy. In some embodiments, said subject has received treatment selected from the group consisting of a PD-1 inhibitor, a PD-L1 inhibitor, and a CTLA-4 inhibitor. In some embodiments, said subject has received a treatment selected from the group consisting of a Tumor-Associated Antigen (TAA) targeted therapy, SEREX antigen-targeted therapy, and a neoantigen-targeted therapy. In some embodiments, said subject has been administered one or more compounds targeting one or more members selected from the group consisting of CD19, HER2, STAT3, IDO, NY-ESO-1, CD40, CSF1R, BCMA, MUC1, ADORA2A, CD20, GD2, TLR7, WTa1, IFNAR1, CD47, EGFR, LAG-3, OX40, PSMA, Mesothelin, TERT, TLR, TLR9, 4-1BB, IL2R, TLR4, CD33, GITR, HPV E6, Survivin, CD123, TIGIT, TIM-3, CD73, HPV E7, TLR3, CD38, EBV, STING, CD22, GPC3, HDAC1, CXCR4, GMCSFR, CD30, CEACAM5, HDAC6, HPV, CD3, MAGE-A3, TNF, PSA, CD25, CEA, EPCAM, CMV, IL12, PRAME, IL12R, 5T4, Beta Catenin, CCR2, PMEL, CXCL12, IGF1, CD46, CXCR1, GMCSF, IL15R, ROR1, TGFBR2, CCR4, FLT-3, FOLR1, GCSFR, ICOS, JAK2, KRAS, VISTA, CD133, CD27, CD39, CEACAM6, NKG2D, STAT5, TGFB1, TLR2, USP7, ANG1, ANG2, B7-H3, CLEC12A, IL13RA2, RIG-1, TRP2, VEGF, AFP, Alpha-Gal, COX-2, EPHA2, gp96, MUC16, p53, TGF-β, CD138, CDwl36, CS1, CXCR2, EGFRvIII, E3 Ligase, Ubiquitin Ligase, Gelactin-3, Globo H, GR, IFNAR2, IFNGR1, IL6, JAK1, MLANA, RAS, SLAMF7, TDO, TGFB2, TLR8, ALK, Arginase, CCR1, CD56, CD70, FAP, GD3, IDH1, IL6R, IRAK4, MAGE-A4, MERTK, MIF, PSCA, PTGER4, SIRPA, TGFB, TGFBR1, ACPP, ADORA2B, AR, Brachyury, CA19-9, CD32, CEACAM1, Gastrin, HDAC, HPV L2, IFNAR, IFNGR, IGF1R, IGF2, IL15, IL17R, IL1B, IL7R, JAK, MAGE-A, MAGE-A1, MAGE-A6, P38, RORC, TLR5, VEGFR2, ADORA3, ATRT, B7-H4, c-KIT, CCR7, CD11b, CD135, CD171, CD174, CDH3, CX3CR1, Gelactin-1, GM3, HLA-A2, HSP70, IL10, IL17, IL2RB, JAK3, MDA5, NKG2A, PBF, PVRIG, SPAM1, URLC10, VEGFR1, ABCB5, ADABP, ADAM17, ADP, AEG1, Alpha-lactalbumin, AMHR2, Angiogenesis, ASPH, AXL, BCL2, BTE6-LX-8b, BTE6-X-15-7, Carbohydrate Antigen, CCL20, CCL3, CCNB1, CD147, CD155, CD16, CD162, CD16a, CD200, CD21, CD28, CD44, CD52, CD54, CD7, CD80, CD88, Claudin 18, cMET, COX2, CSF1, CTCFL, CXCR5, CXCR7, ElA, EIF2AK3, ERG, FGF2, FN1, GC, GM2, gpA33, HBV, Hemagglutinin, HER3, HILPDA, HLA-DR, HMW-MAA, HP59, HPV 16, HPV E6/7, HPV L1, HSP105, HSP65, HVEM, Hyaluronan, IL13RA1, IL2, IL21R, ILDR2, IL8, KIF20A, KIR2DL1, KIR2DL3, LXR, MAGE-A10, MAGE-C2, Mammaglobin A, MAPK, MICA, MiHA, MMP-11, MVP, Myeloblastin, N-Myc, NKp46, NLRP3, NR2F6, Oncofetal Antigen, P2RX7, RhoC, SIM-2, SSTR2, SSX2, STAT1, STn, TAG72, TAMA, TFDP3, TGFBR, TSA, TYK2, Tyrosinase, VEGFA, Ecto 5′ Nucleotidase, CD73, NT5E, ADAM9, Adenosine, AIM2, B7-H6, BAFF-R, BAI1, BARD1, BOB-1, CA9, Cancer Testis Antigen (CTA), CB2, CBLB, CCR9, CD13, CD130, CD150, CD160, CD200R1, CD267, CD29, CD3E, CD4, CD51, CD8, Claudin 6, CLEC2D, COX, COX-1, CPEB4, CPEG4, CRBN, CRLF2, CSPG4, CTA, CXCL1, CXCR3, Cytosine Deaminase, DCK, DKK1, DLL3, DR3, DR5, EBNA3C, EGF, EGFR5, ELVAL4, EPHA3, EPS8, EVI1, FAIM-3, FasR, FCU1, FLT3, FOLR, FOXM1, FSHR, Galectin-3, GalNAc, GARP, Gelactin-9, Gelatcin-1/3/9, GLD18, GNRHR, GP160, GP73, H3.3K27M, HAGE, HDAC2, HDAC8, HPV16 E6, HPV16 E7, HSP, Hypoxia Pathway, ICAM, ICAM7, IDO1, IFNG, IFNGR2, IGF2R, IGFBP2, IGK@, IL10RA, IL12RB1, IL13, IL13R, IL13Ralpha2, IL15RA, IL17A, IL17B, IL18, ILlA, IL1R1, IL1R3, IL21, IL22R, IL27R, IL2RA, IL35, IL9R, Integrin Beta-7, IRAK1, ITGB5, Kappa Myeloma Antigen, KIR2DL2, Kynurenine, LlCAM, Lambda Myeloma Antigen, LAMP, LLO, LXRA, LXRB, Mas Receptor, MG7, MHCI, MHCII, MIC, MOSPD2, MRP-3, MRP1, MRP3765, muGNTP01, MYB, MYBL2, NFAT, NGcGM3, Nrf2, p38 MAP Kinase, P55, PAM4, PAP, PASD1, PCDH18, PD-L2, PI3K-delta, POTE, PPT, Protein Tolemerase, PTGER2, RANKL, RBL001, RNF43, ROR2, S100A9, SLAMF1, STAT, TACSTD2, TASTD2, TDO2, TEM, Thymidine Kinase, Thymidylate Synthase, TIE2, TIMP3, TM4SF5, TOP1, TRBC1, TRBC2, TRIF, Tryptophan, TSHR, TWEAK, UTA2-1, VDBP, VRP, VSIG-4, XAGE1, XAGE1A, ZP1, and ZP3. In some embodiments, said one or more compounds is a biologic, a small molecule, a cell therapy, a vaccine, a monoclonal antibody, an antibody-drug conjugate, a tumor infiltrating cell therapy, a chimeric antigen receptor cell therapy, a polyspecific antibody, an organoid, a targeted therapy, an immunotherapy, a chemotherapy, or a stem cell therapy. In some embodiments, said therapeutic is a targeted therapy, chemotherapy, radiotherapy, or surgical therapy. In some embodiments, said peptide display library comprises a sequence corresponding to at least 10, at least 20, at least 30, at least 40, or at least 50 consecutive amino acids at least one of SEQ ID NOs: 1-1752 or a variant thereof. In some embodiments, said peptide display library comprises greater than or equal to about 10, 50, 100, 500, 1000 or more peptide epitopes. In some embodiments, said sample comprises whole blood, peripheral blood, serum, saliva, sweat, urine, mucus, cerebrospinal fluid, synovial fluid, or plasma. In some embodiments, the method further comprises using said target to generate an antibody repertoire for said subject.

[0010] In some aspects, the present disclosure provides for a method of identifying a therapeutic or diagnostic target for a disease, comprising: (a) contacting a sample of a subject with a peptide display library comprising a plurality of non-wild type epitopes of antibodies under conditions sufficient to form a complex comprising an antibody from said sample coupled to a non-wild type epitope of an antibody from said plurality of non-wild type epitopes of antibodies; (b) identifying said non-wild type epitope of said antibody, thereby identifying a target of said antibody; and (c) using said target identified in (b) to identify said therapeutic or diagnostic target for said disease. In some embodiments, said disease is cancer. In some embodiments, the method further comprises subjecting said complex to nucleic acid amplification under conditions sufficient to amplify said complex to yield an amplified complex. In some embodiments, the method further comprises determining a sequence of said amplified complex. In some embodiments, the method further comprises using said sequence of said amplified complex to generate said antibody repertoire. In some embodiments, said peptide display library further comprises a wild type epitope of an antibody. In some embodiments, said plurality of non-wild type epitopes of antibodies comprise variants of wild-type proteins selected from the group consisting of a somatic single amino acid substitution variant, an insertion-deletion variant, a structural variant such as a gene fusion or splice junction variant, and a frameshifted protein sequence induced downstream of a missense mutation. In some embodiments, the method further comprises administering to said subject a cancer therapeutic directed to said epitope or a protein comprising said epitope. In some embodiments, said cancer therapeutic is selected from the group consisting of a vaccine, a monoclonal antibody, an intravenous immunoglobulin, an antibody-drug conjugate, a chimeric antigen receptor, and a small molecule. In some embodiments, said subject has previously received an immunotherapeutic, and wherein (a)-(c) are repeated periodically (e.g. weekly, biweekly, every month, every 2 months, or every 6 month) to monitor a response to said immunotherapeutic. In some embodiments, said cancer therapeutic is an immunotherapeutic selected from the group consisting of a PD-1 inhibitor, a PD-L1 inhibitor, and a CTLA-4 inhibitor. In some embodiments, said peptide display library comprises a sequence corresponding to at least 10, at least 20, at least 30, at least 40, or at least 50 consecutive amino acids at least one, at least 5, at least 10, at least 20, at least 50, at least 100, at least 200, at least 300, at least 400, at least 500, at least 600, at least 700, at least 800, at least 900, at least 1000, at least 1100, at least 1200, at least 1300, at least 1400, at least 1500, at least 1600, at least 700, or all of the sequences selected from SEQ ID NOs: 1-1752 or a variant thereof. In some embodiments, said peptide display library comprises greater than or equal to about 10, about 50, about 100, about 500, about 1000, about 1500, about 1700, about 2000, about 5000, about 7000, about 10,000, about 15,000 about 25,000, about 50,000, about 75,000, about 100,000, about 200,000, about 300,000, about 400,000, or about 500,000 or more peptide epitopes.

[0011] In some aspects, the present disclosure provides for a method for treating a subject having or suspected of having a cancer, comprising administering an antibody or antigen binding fragment or derivative thereof to said subject, wherein said antibody or antigen binding fragment or derivative thereof is directed to an epitope identified by a method described herein.

[0012] In some aspects, the present disclosure provides for a method for treating a subject having or suspected of having a cancer, comprising detecting at least one antibody or antigen binding fragment or derivative thereof in a sample from said subject, wherein said antibody or antigen binding fragment or derivative thereof is identified by a method described herein, and administering an immunotherapy to said subject in which said at least one antibody is detected.

[0013] In some aspects, the present disclosure provides for an antibody or antigen binding fragment or derivative thereof directed against an epitope identified by a method described herein.

[0014] In some aspects, the present disclosure provides for use of an antibody or antigen binding fragment or derivative thereof for treatment of cancer, wherein said antibody or antigen binding fragment or derivative thereof is directed to an epitope identified by a method described herein.

[0015] In some aspects, the present disclosure provides for an antibody or antigen binding fragment or derivative thereof directed against an epitope identified by any of the methods described herein. In some aspects, the antibody is first identified from a sample from a patient via its epitope using any of the peptide libraries (e.g. peptide libraries comprising non-wild type antigens or a mixture of non-wild-type antigens and wild type antigens) herein, and then the epitope is used to isolate PBMCs obtained from the patient (e.g. PBMCs unsorted or pre-sorted for the CD19 or CD20 markers for B-cells) encoding said antibody.

[0016] In some aspects, the present disclosure provides for a method of treating a subject having or suspected of having a disease, comprising: (a) detecting a presence of at least one antibody in a sample of said subject, which at least one antibody is directed to a non-wildtype variant of one or more peptides selected from the group consisting of ABCC2, PODXL-ZNF467, RFC1, ARID3B, EPB41, RREB1, H2AFV-RARA, NXF2B, C8G-C8G, KIF13A-KIF13A, PRRC2B, TTN, PGLYRP2, CHD7, PALD1, PDYN, RNF10, and SOX2; and (b) administering an immunotherapeutic agent when said sample exhibits a presence of said at least one antibody. In some embodiments, said disease is cancer, and said cancer is selected from the group consisting of anaplastic cancer, medullary thyroid cancer, appendiceal cancer, arrhenoblastoma, biliary tract carcinoma, B-cell lymphoma, bladder cancer, breast cancer, cancers of the bile duct, carcinoid tumor, cervical cancer, cholangiocarcinoma, colon cancer, colorectal cancer, craniopharyngioma, endometrial cancer, epithelial intraperitoneal malignancy with malignant ascites, esophageal cancer, Ewing sarcoma, fallopian tube cancer, follicular cancer, gall bladder cancer, gastric cancer, gastrointestinal stromal tumor (GIST), GE-junction cancer, genito-urinary tract cancer, glioma, glioblastoma, head and neck cancer, head and neck squamous cell carcinoma, hepatoblastoma, hepatocarcinoma, hepatocellular carcinoma, Hodgkin lymphoma, non-Hogdkin lymphoma, HR+ and HER2+ breast cancer, Hurthle cell cancer, Inflammatory breast cancer, Kaposi sarcoma, kidney cancer, laryngeal cancer, liposarcoma, liver cancer, lung cancer, medulloblastoma, melanoma, Merkel cell carcinoma, microsatellite instability high or DNA mismatch repair deficient solid tumors, neuroblastoma, neuroblastoma, neuroendocrine cancer, non-small cell lung cancer, osteosarcoma (bone cancer), ovarian cancer, ovarian cancer with malignant ascites, pancreatic cancer, pancreatic neuroendocrine tumor, papillary cancer, parathyroid cancer, peritoneal carcinomatosis, peritoneal mesothelioma, primitive neuroectodermal tumor, prostate cancer, renal cell carcinoma, retinoblastoma, rhabdomyosarcoma, salivary gland carcinoma, sarcoma, skin cancer, small cell lung cancer, non-small cell lung cancer, mall intestine cancer, stomach cancer, testicular cancer, thyroid cancer, triple negative breast cancer, urothelial cancer, uterine cancer, uterine serous carcinoma, vaginal cancer, vulvar cancer, and Wilms tumor. In some embodiments, said disease is cancer, and said cancer is selected from the group consisting of melanoma, B-cell lymphoma, non-small cell lung cancer, bladder cancer, head and neck squamous cell carcinoma, hepatocellular carcinoma, Hodkin lymphoma, Merkel cell carcinoma, and microsatellite instability high or DNA mismatch repair deficient solid tumors. In some embodiments, said sample is a peripheral blood, whole blood, serum, or plasma sample.

[0017] Additional aspects and advantages of the present disclosure will become readily apparent to those skilled in this art from the following detailed description, wherein only illustrative embodiments of the present disclosure are shown and described. As will be realized, the present disclosure is capable of other and different embodiments, and its several details are capable of modifications in various obvious respects, all without departing from the disclosure. Accordingly, the drawings and description are to be regarded as illustrative in nature, and not as restrictive.

### INCORPORATION BY REFERENCE

[0018] All publications, patents, and patent applications mentioned in this specification are herein incorporated by reference to the same extent as if each individual publication, patent, or patent application was specifically and individually indicated to be incorporated by reference. To the extent publications and patents or patent applications incorporated by reference contradict the disclosure contained in the specification, the specification is intended to supersede and/or take precedence over any such contradictory material.

### BRIEF DESCRIPTION OF THE DRAWINGS

[0019] The novel features of the invention are set forth with particularity in the appended claims. A better understanding of the features and advantages of the present invention will be obtained by reference to the following detailed description that sets forth illustrative embodiments, in which the principles of the invention are utilized, and the accompanying drawings (also “figure” and “FIG.” herein), of which:

[0020] FIG. 1 shows a schematic of diverse classes of non-wild type de novo somatic coding mutations, in relation to their respective wild type gene sequences (left; Wild Type Gene A, WTGA, and Wild Type Gene B, WTGB). Nucleic acid mutations may introduce different classes of changes at the amino acid level, including single amino acid substitutions, and insertions and deletions (both in-frame and frameshift). Furthermore, mutations may induce truncations (stop gain and start loss) or extensions (stop loss or start gain) of genes. Finally, larger structural mutations (including gene fusions and alternative splicing variants) induce large changes to protein sequence that can have significant impacts on protein structure, function, and impact in regulation of healthful and/or disease biology.

[0021] FIG. 2 shows a workflow of how a database of patient-derived simple somatic mutations are reduced into an immunoassay library design. In particular, over 80 million exonic mutations are aggregated from tumor-normal whole genome sequencing data for over 20,000 patients with cancer, including donors to the International Cancer Genome Consortium (ICGC) project and database. Bioinformatics software workflows are used to prioritize particular mutations for inclusion in an immunoassay library (based on biological and statistical criteria), and to convert the description of the mutation into protein and nucleic acid level sequences changes that may be included in an oligonucleotide sequencing pool library and ultimately incorporated into a peptide display immunoassay system.

[0022] FIG. 3 shows a workflow of how a database of patient-derived gene fusions are reduced into an immunoassay library design. In particular, over 100,000 unique gene fusions are aggregated from multiple databases of gene fusion observations in disease. The information that identifies each of these gene fusions (including the fusion gene partners, and the genomic location of the fusion junction breakpoints that unite them into a chimeric fusion gene sequence) is utilized to model the precise protein sequence induced by the structural gene fusion variant, using bioinformatics software workflows and databases to infer fusion junction peptides while considering different permutations of protein isoform combinations. Finally, fusions inducing frameshifts are further modeled to capture potential frame-shifted peptides downstream of the fusion junction, for inclusion in the immunoassay library design.

[0023] FIG. 4 shows a workflow of how a database of patient-derived alternative splicing variants are reduced into an immunoassay library design. In particular, over 200,000 unique splice variants are aggregated from multiple databases. These databases, in some cases, identify splicing events that are disease specific (e.g. splicing events observed in sequencing data from The Cancer Genome Atlas (TCGA) cancer tissue biopsies, but not in tissue samples and data from the Genotype-Tissue Expression (GTEx) project). The information that identifies each of these splice variants (including the particular gene undergoing splicing, and the genomic location of the splice junction breakpoints) is utilized to model the precise protein sequence induced by the structural splicing variant, using bioinformatics software workflows and databases to infer splice junction peptides across multiple protein isoforms. Finally, splice variants inducing frameshifts are further modeled to capture potential frame-shifted peptides downstream of the splice junction, for inclusion in the immunoassay library design.

[0024] FIG. 5 shows a schematic of specific instances of fusion genes modeled by the fusion gene bioinformatics workflow in FIG. 3 and prioritized for inclusion on an immunoassay library design. These include the SS18-SSX1 and TFG-MET fusions (common in sarcoma), BCR-ABL1 and NTRK3-ETV6 fusions (common in leukemias), TMPRSS2-ERG and SLC45A3-FOXP1 (common in prostate cancer), and EGFR-SEPT14 and EML4-ALK fusions (seen in lung cancer, colorectal cancer, and glioblastoma). Gene fusion diagrams label and highlight the presence and fusion of particular protein domains (in blue) relative to a fusion junction (vertical black line), as well as the locations of particular exons (in red and black) in the respective fusion partners.

[0025] FIG. 6 shows a schematic of specific instances of fusion genes modeled by the alternative splicing bioinformatics workflow in FIG. 4 and prioritized for inclusion on an immunoassay library design. These include the TP53, RET, PTEN, ROS1, KRAS, MET, EGFR, and ALK, which are frequently mutated, therapeutically actionable driver oncogenes linked to the molecular etiology of diverse cancer and tumor types. Alternative splicing diagrams label and highlight the presence and fusion of particular protein domains (in blue) relative to a splice junction (vertical black line), as well as the locations of particular exons (in red and black) in the subsequent splice gene sequence.

[0026] FIG. 7 shows a schematic of how oligonucleotides downstream of a frameshift mutation are designed for inclusion in the immunoassay screening library. Specifically, in the event of a frameshift (e.g. as induced by DNA mutation or RNA translation error) to the standard open reading frame, a de novo sequence downstream of the frameshift junction is created. Oligonucleotides are designed that cover the frameshift region and the subsequent sequences downstream for inclusion as antibody epitopes in the immunoassay library, in order to probe antibody responses against frameshifted peptide neoantigens arising in the proteome of cancer or other diseases.

[0027] FIG. 8 shows a diagram of the composition for a non-wild type antigen immunoassay library design of 591,539 unique peptides. The larger circular pie chart (left) shows a distribution of protein-encoding oligonucleotides included in the library design, including Simple Somatic Mutations, Gene Fusions, Alternative Splicing Variants, and Positive Controls. The smaller circular pie charts break down the composition of several subcategories, including Simple Somatic Mutations, Gene Fusions, and Alternative Splicing Variants. In particular, the Simple Somatic Mutations subcategory is comprised of Missense Variants, Gain of Start or Stop Codons, Frameshifts, Insertions, Deletions, Loss of Start or Stop Codons, and Initiator Codon Variants. Positive Controls, and silent Synonymous variants notably may encode wild type sequences, as a point of comparison for predominantly non-wild type library content. Likewise, the Gene Fusion and Alternative Splicing Variants subcategories are comprised of junction peptides (at the breakpoint for a gene fusion or alternative splicing recombination event) and downstream peptides (for variants resulting in a frameshift).

[0028] FIG. 9 shows a schematic of library quality control and packaging efficiency. The blue density curve shows the mean-normalized distribution of counts for a particular oligonucleotide included in the DNA library design, as measured by directly by NGS for quality control purposes. In orange is the distribution of library design member oligos after packaging into the peptide display expression vector. The orange curve shows a relatively more dispersed but distributionally consistent density of counts, reflecting the introduction of additional variance by the stochastic nature of cloning and packaging oligonucleotides into the peptide display expression vector system.

[0029] FIG. 10 shows a plot whereby count data for one version of the packaged and expressed immunoassay library (y-axis) are compared to a subsequent reamplification of the same library at a different juncture (x-axis), with all data points being mean-normalized counts as ascertained by NGS of a particular peptide display library. The predominant concentration of read density at the origin, and overall adherence of further data points to the y=x identity axis, reflects a large degree of robust and reproducible representation across multiple, independent reamplifications of the same source peptide display library.

[0030] FIG. 11 shows a schematic of the NGS immunoassay experimental protocol. First a peptide display library is produced by synthesizing and packaging an oligonucleotide library encoding protein antigens of interest into an expression vector, such as bacteriophage. Next, the library is expressed in the peptide display system and hybridized to a patient biospecimen containing antibodies. Antibodies are immunoprecipitated and the oligonucleotides are NGS sequenced, as a DNA barcode readout for the identity of the protein antigens matching cognate antibodies in the patient sample. The resulting data may be statistically analyzed with respect to patient outcome to glean particular antibodies or antibody repertoire signatures of therapeutic response outcomes, with potential biomarker utility or therapeutic translatability.

[0031] FIG. 12 shows a schematic of robotic and programmatic plate randomization, whereby technical replicates are distributed from a common source plate to multiple destination plates, in different well locations to reduce technical artifacts. Randomization is illustrated through the distribution of positive control wells (green, blue, red, and grey) in different locations on each of three destination plates.

[0032] FIG. 13 shows a schematic of immunoassay results for control samples, where data points are individual peptide display library peptides, the x-axis illustrates the null distribution of peptide display library peptide binding to a control condition (e.g. biological or technical controls), and the y-axis illustrates the levels of binding for a particular patient sample, plate, or positive or negative control. Top Row: The leftmost plot shows the consistency between background (bead-only control) binding levels for a particular 96-well microplate, versus the background (bead-only control) binding levels aggregated across other plates, as depicted by relative agreement aligned to the y=x identity axis. The middle plot likewise illustrates a high level of identity, reproducibility, and consensus for background (bead-only control) binding, across all background plates. The rightmost plot shows sparse levels of binding for a “canary” well (absent any quantity of protein-display or peptide-display library or patient sample), demonstrating a paucity of cross contamination and nominal levels of any binding that are well controlled by the background null distribution. Bottom Row: The leftmost plot shows binding levels for a biospecimen from a healthy patient (non-cancer, non-autoimmune), and a lack of significantly enriched peptides in relation to the background distribution. The middle plot likewise illustrates a relative lack of enrichment of library peptides for a cohort of healthy patients, in relation to a null distribution of background binding levels. In contrast, the rightmost plot shows a highly enriched and specific level of binding for a spiked-in monoclonal antibody (Anti-GFAP), enriching for high level of binding of a GFAP peptide specifically included in the library as a positive control.

[0033] FIG. 14 shows two plot of immunoassay results for technical replicates from a given serum sample from a seropositive patient. Data points are individual peptide display library peptides, the x-axis illustrates the null distribution of peptide display library peptide binding to a control condition (e.g. biological or technical controls), and the y-axis illustrates the levels of binding for a particular patient sample, plate, or positive or negative control. Data points significantly deviating from the line of best fit are filled with red coloring and labeled with captions to illustrate the protein from which a particular peptide display library peptide derives, and the particular non-wild type somatic mutation that the peptide encodes. The highly consistent results illustrate a high level of technical reproducibility between multiple, independent immunoassays applied to a given sample of interest.

[0034] FIG. 15 shows a plot and regression trendline for a background distribution of control conditions specifically, a bead-only control plate, whereby an entire microplate of wells containing only phosphate buffered saline (PBS), absent patient biospecimen, is run through the immunoassay protocol and NGS sequenced to capture the background distribution of immunoassay peptide display library peptide binding. A regression line of best fit is measured to estimate the amount of variance for a particular data point (library peptide) with a particular level of background binding. Variance estimates are used to later measure statistical significance of a binding level ascertained for a particular sample of interest, in relation to the background levels of binding estimated by the control plate its respective variance estimates.

[0035] FIG. 16 shows two plots of immunoassay results for technical replicates from a given serum sample from a seropositive cancer patient, with molecular involvement of TP53 in both their tumor biopsy and their immunoassay antibody repertoire data. Data points are individual peptide display library peptides, the x-axis illustrates the null distribution of peptide display library peptide binding to a control condition (e.g. technical controls), and the y-axis illustrates the levels of binding for a particular patient sample, plate, or positive or negative control. The triple-negative breast cancer patient in question (AV349) was identified to carry a mutation in TP53 (the oncogene most frequently mutated in the cancer genome) as measured by the liquid biopsy Guardant 360 assay. Using the non-wild type antigen NGS immunoassay, it is retrospectively identified here that the patient in question harbors antibodies targeting TP53 mutant peptides at baseline, prior to their treatment with Anti-PD-1 checkpoint inhibitor pembrolizumab (Keytruda).

[0036] FIG. 17 shows a hierarchical clustering of data points from unique patients on the same 96 well plate input to the immunoassay protocol, including replicate, longitudinal timepoints from specific patients. The columns and rows are a list of patient sample identifiers, in the same ordering, and the individual grid points illustrate the percent of similarity with respect to the antibody repertoire data profile for two samples. The top-left to bottom-right diagonal illustrates the identity line (all values are equal to 1.0). Colored bars in the top row illustrate the class of sample for a given 96 well plate, including cancer patient samples (yellow), negative control wells (grey), technical positive control (green), technical negative control (red), and biological positive control (orange). Hierarchical clustering algorithms reveal an underlying structure of similarity reflective of longitudinal time courses of blood draws by patients consenting and donating under the study protocols. In particular, replicate samples from unique patients cluster exclusively with one another (e.g. white arrow and box), illustrating the discriminative validity of the NGS immunoassay in determining the unique antibody repertoire and immune fingerprint characteristic of a given patient.

[0037] FIG. 18 shows a distribution of the enrichment scores within individual cancer patients for peptides with significant enrichment levels (P<0.05; in red). A distribution of the corresponding peptide's median enrichment scores in serum or plasma from healthy subjects (n=20) is also shown (blue). This figure shows that the scores for enriched peptides in cancer patients are significantly higher than in healthy subjects (P<2.9*10⁻¹⁸⁷; Kruskal-Wallis test).

[0038] FIG. 19 shows the longitudinal immune response for a small cell lung cancer patient having received Anti-PD-L1 checkpoint inhibitor therapy. The subject was diagnosed with stage IV disease prior to treatment with immune checkpoint inhibitor (atezolizumab (Tecentriq) Anti-PD-L1 checkpoint inhibitor) and chemotherapy. The subject went on to experience severe celiac neuropathy after therapy was withheld due to severe nausea, vomiting, and gastroparesis. Subsequently, the patient furthermore experienced a complete response to immunotherapy treatment. The left plot shows the immune response of the patient at timepoint prior to hospital admission, and the right plot at a subsequent time point. The elevated levels of significant antibodies against non-wild type library antigens in select genes and proteins (TTN, PGLYRP2, CHD7, PALD1, PDYN, RNF10), in the context of the complete response outcome for the given study subject, supports observations that the presence of antibodies in cancer patients undergoing immune checkpoint blockade can serve as an immune correlate of therapeutic efficacy and autoimmune toxicity.

[0039] FIG. 20 shows the longitudinal immune response for a cancer patient receiving Anti-PD-L1 checkpoint inhibitor therapy. The subject in question is a small cell lung cancer patient with stage IV disease who received a combination of chemotherapy and immunotherapy (atezolizumab (Tecentriq) Anti-PD-L1 checkpoint inhibitor) and experienced severe immune related adverse events (pneumonitis and athralgia) during the course of therapy. The leftmost plot shows the immune response of the patient at baseline, prior to treatment with immune checkpoint blockade, wherein no statistically significant antibody data points are noted prior to treatment. The middle plot shows a change in the immune response for a subsequent timepoint taken on-treatment, after diagnosis with checkpoint arthralgia and at the time of diagnosis with severe checkpoint pneumonitis, wherein a statistically significant signal arises in a non-wild type peptide of SOX2. SOX2, in addition to being a canonical marker of developmental stem cell biology and a stem cell pluripotency “reprogramming factor,” has been implicated in overexpression analyses, genomic alteration analyses, and antibody analyses in small cell lung cancer and its associated paraneoplastic autoimmune syndromes. Subsequently, the rightmost plot, corresponding to a blood sample timepoint drawn at the time of the pneumonitis autoimmune adverse event, shows a consistent signal of increasing statistical significance for antibodies recognizing the SOX2 non-wild type antigen, illustrating the longitudinal dynamics of an immune response to a non-wild type antigen implemented in the immunoassay library.

[0040] FIG. 21 shows a schematic of a computer system that is programmed or otherwise configured to implement methods of the present disclosure.

### DETAILED DESCRIPTION

[0041] While various embodiments of the invention have been shown and described herein, it will be obvious to those skilled in the art that such embodiments are provided by way of example only. Numerous variations, changes, and substitutions may occur to those skilled in the art without departing from the invention. It should be understood that various alternatives to the embodiments of the invention described herein may be employed.

[0042] The present disclosure provides methods, systems, and compositions, for assaying an immune response to a non-wild type antigenic target. The disclosure may leverage the use of novel genomic technology to predict and monitor treatment outcomes, and to discover novel antigenic therapeutic targets and therapeutic molecule assets.

[0043] The terminology used herein is for the purpose of describing particular cases only and is not intended to be limiting. As used herein, the singular forms “a”, “an” and “the” are intended to include the plural forms as well, unless the context clearly indicates otherwise. Furthermore, to the extent that the terms “including”, “includes”, “having”, “has”, “with”, or variants thereof are used in either the detailed description and/or the claims, such terms are intended to be inclusive in a manner similar to the term “comprising.”

[0044] The term “about” or “approximately” generally refers to an amount that is near the stated amount by about 10%, 5%, or 1%, including increments therein. For example, “about” or “approximately” can mean a range including the particular value and ranging from 10% below that particular value and spanning to 10% above that particular value.

[0045] The practice of some methods disclosed herein employ, unless otherwise indicated, techniques of immunology, biochemistry, chemistry, molecular biology, microbiology, cell biology, genomics and recombinant DNA. See for example Sambrook and Green, Molecular Cloning: A Laboratory Manual, 4th Edition (2012); the series Current Protocols in Molecular Biology (F. M. Ausubel, et al. eds.); the series Methods In Enzymology (Academic Press, Inc.), PCR 2: A Practical Approach (M. J. MacPherson, B. D. Hames and G. R. Taylor eds. (1995)), Harlow and Lane, eds. (1988) Antibodies, A Laboratory Manual, and Culture of Animal Cells: A Manual of Basic Technique and Specialized Applications, 6th Edition (R. I. Freshney, ed. (2010)), each of which is entirely incorporated herein by reference.

[0046] The term “nucleotide”, as used herein, generally refers to a base-sugar-phosphate combination. A nucleotide may comprise a synthetic nucleotide. The nucleotide may comprise a synthetic nucleotide analog. The nucleotide may be naturally occurring. Nucleotides may be monomeric units of a nucleic acid sequence (e.g., deoxyribonucleic acid (DNA) and ribonucleic acid (RNA)). The term nucleotide may include ribonucleoside triphosphates adenosine triphosphate (ATP), uridine triphosphate (UTP), cytosine triphosphate (CTP), guanosine triphosphate (GTP) and deoxyribonucleoside triphosphates such as dATP, dCTP, dITP, dUTP, dGTP, dTTP, or derivatives thereof. Such derivatives may include, for example, [αS]dATP, 7-deaza-dGTP and 7-deaza-dATP, and nucleotide derivatives that confer nuclease resistance on the nucleic acid molecule containing them. The term nucleotide as used herein may refer to dideoxyribonucleoside triphosphates (ddNTPs) and their derivatives. Illustrative examples of dideoxyribonucleoside triphosphates may include, but are not limited to, ddATP, ddCTP, ddGTP, ddITP, and ddTTP.

[0047] The terms “polynucleotide,” “oligonucleotide,” and “nucleic acid” generally refer to a polymeric form of nucleotides of any length, either deoxyribonucleotides or ribonucleotides, or analogs thereof, either in single-, double-, or multi-stranded form. A polynucleotide may be exogenous or endogenous to a cell. A polynucleotide may exist in a cell-free environment. A polynucleotide may be a gene or fragment thereof. A polynucleotide may be DNA. A polynucleotide may be RNA. A polynucleotide may have any three-dimensional structure and may perform any function. A polynucleotide may comprise one or more analogs (e.g., altered backbone, sugar, or nucleobase). If present, modifications to the nucleotide structure may be imparted before or after assembly of the polymer. Some non-limiting examples of analogs include: 5-bromouracil, peptide nucleic acid, xeno nucleic acid, morpholinos, locked nucleic acids, glycol nucleic acids, threose nucleic acids, dideoxynucleotides, cordycepin, 7-deaza-GTP, fluorophores (e.g., rhodamine or fluorescein linked to the sugar), thiol containing nucleotides, biotin linked nucleotides, fluorescent base analogs, CpG islands, methyl-7-guanosine, methylated nucleotides, inosine, thiouridine, pseudourdine, dihydrouridine, queuosine, and wyosine. Non-limiting examples of polynucleotides include coding or non-coding regions of a gene or gene fragment, loci (locus) defined from linkage analysis, exons, introns, messenger RNA (mRNA), transfer RNA (tRNA), and ribosomal RNA (rRNA).

[0048] The terms “peptide,” “polypeptide,” and “protein” generally refer to a polymer of at least two amino acid residues joined by peptide bond(s). These terms generally do not connote a specific length of polymer, nor are they intended to imply or distinguish whether a peptide is produced using recombinant techniques, chemical or enzymatic synthesis, or is naturally occurring. A peptide may be a protein; in some instances, however, the peptide may not be a protein. The peptide may be, for example, an antibody. The terms apply to naturally occurring amino acid polymers as well as amino acid polymers comprising at least one modified amino acid. In some cases, the polymer may be interrupted by non-amino acids. The terms include amino acid chains of any length of 2 or greater amino acids, including full length proteins, and proteins with or without secondary and/or tertiary structure (e.g., domains). The terms also encompass an amino acid polymer that has been modified, for example, by disulfide bond formation, glycosylation, lipidation, acetylation, phosphorylation, oxidation, and any other manipulation such as conjugation with a labeling component. The terms “amino acid” and “amino acids,” as used herein, generally refer to natural and non-natural amino acids, including, but not limited to, modified amino acids and amino acid analogues. Modified amino acids may include natural amino acids and non-natural amino acids, which have been chemically modified to include a group or a chemical moiety not naturally present on the amino acid. Amino acid analogues may refer to amino acid derivatives. The term “amino acid” includes both D-amino acids and L-amino acids.

[0049] The term “antigen” generally refers to the structure or binding determinant that an antibody, antibody fragment or an antibody fragment-based molecule binds to or has specificity against. The target antigen may be polypeptide, carbohydrate, nucleic acid, lipid, hapten or other naturally occurring or synthetic compound or portions thereof. An antigen is also a ligand for those antibodies or antibody fragments that have binding affinity for the antigen.

[0050] The term “antibody” generally encompasses various antibody structures, including but not limited to monoclonal antibodies, polyclonal antibodies, multispecific antibodies (e.g., bispecific antibodies), nanobodies, VHH antibodies, full-length antibodies, and antibody fragments and derivatives so long as they exhibit the antigen-binding activity or immunological activity. The full-length antibodies may be, for example, monoclonal, recombinant, chimeric, deimmunized, humanized and human antibodies. Antibodies represent a large family of molecules that include several types of molecules, such as IgD, IgG, IgA, IgM and IgE. It has been shown that the antigen binding function of an antibody can be performed by fragments of a naturally-occurring antibody or monoclonal antibody.

[0051] An “antigen binding fragment” as used herein generally refers to an immunoglobulin molecule and immunologically active portions of immunoglobulin molecule, i.e., a molecule that contains an antigen-binding site which specifically binds (“immunoreacts with”) an antigen. Examples include but are not limited to Fv, Fab, Fab′, Fab′-SH, F(ab′)2, diabodies, linear antibodies (see U.S. Pat. No. 5,641,870), a single domain antibody, a single domain camelid antibody, single-chain fragment variable (scFv) antibody molecules, and multispecific antibodies formed from antibody fragments that retain the ability to specifically bind to antigen. Also encompassed within the term “antigen binding fragment” is any polypeptide chain-containing molecular structure that has a specific shape which fits to and recognizes and binds to an epitope, where one or more non-covalent binding interactions stabilize the complex between the molecular structure and the epitope. An antigen binding fragment “specifically binds to” or is “immunoreactive with” an antigen if it binds with greater affinity or avidity than it binds to other reference antigens including polypeptides or other substances.

[0052] The term “epitope” refers to the particular site on an antigen molecule to which an antibody, antibody fragment, or binding domain binds. An epitope may be a ligand of an antibody or antibody fragment.

[0053] The term “monoclonal antibody” as used herein generally refers to an antibody obtained from a population of substantially homogeneous antibodies, i.e., the individual antibodies comprising the population are identical and/or bind the same epitope, except for possible variant antibodies, e.g., containing naturally occurring mutations or arising during production of a monoclonal antibody preparation, such variants generally being present in minor amounts. In contrast to polyclonal antibody preparations, which include different antibodies directed against different determinants (epitopes), each monoclonal antibody of a monoclonal antibody preparation is directed against a single determinant on an antigen. Thus, the modifier “monoclonal” indicates the character of the antibody as being obtained from a substantially homogeneous population of antibodies and is not to be construed as requiring production of the antibody by any particular method. For example, the monoclonal antibodies to be used in accordance with the present disclosure may be made by a variety of techniques, including but not limited to the hybridoma method, recombinant DNA methods, phage-display methods, and methods utilizing transgenic animals containing all or part of the human immunoglobulin loci, such methods and other example methods for making monoclonal antibodies being known in the art or described herein.

[0054] A “subject” can be a mammal. Mammals include, but are not limited to, domesticated animals (e.g., cows, sheep, cats, dogs, and horses), primates (e.g., humans and non-human primates such as monkeys), rabbits, and rodents (e.g., mice and rats). In certain embodiments, the subject or individual is a human. The subject may be a patient. The subject may be displaying or exhibiting a disease (e.g., a cancer). Alternatively, the subject may be asymptomatic with respect to the disease.

[0055] The terms “cancer” and “cancerous” generally refer to or describe the physiological condition in mammals that is characterized by unregulated cell growth/proliferation. Examples of cancer include any of the types of cancer described herein. Examples of cancer include, but are not limited to, carcinomas, Hodgkin's lymphoma, non-Hodgkin's lymphoma, B cell lymphoma, T-cell lymphoma, follicular lymphoma, mantle cell lymphoma, blastoma, breast cancer, colon cancer, prostate cancer, head and neck cancer, any form of skin cancer, melanoma, genito-urinary tract cancer, ovarian cancer, ovarian cancer with malignant ascites, peritoneal carcinomatosis, uterine serous carcinoma, endometrial cancer, cervical cancer, colorectal cancer, an epithelia intraperitoneal malignancy with malignant ascites, uterine cancer, mesothelioma in the peritoneum kidney cancers, lung cancer, small-cell lung cancer, non-small cell lung cancer, gastric cancer, esophageal cancer, stomach cancer, small intestine cancer, liver cancer, hepatocarcinoma, hepatoblastoma, liposarcoma, pancreatic cancer, gall bladder cancer, cancers of the bile duct, salivary gland carcinoma, thyroid cancer, epithelial cancer, adenocarcinoma, sarcomas of any origin, primary hematologic malignancies including acute or chronic lymphocytic leukemias, acute or chronic myelogenous leukemias, myeloproliferative neoplastic disorders, or myelodysplastic disorders, myasthenia gravis, Morbus Basedow, Hashimoto thyroiditis, or Goodpasture syndrome.

[0056] As used herein, “suspected of having a disease” generally refers to a subject suspected of having any of the diseases (e.g., cancers) described herein. In some embodiments, the subject has at least one symptom of the disease (e.g., cancer).

[0057] As used herein, “treatment” or “treating,” or “palliating,” or “ameliorating” generally refers to an approach for obtaining beneficial or useful results including but not limited to a therapeutic benefit and/or a prophylactic benefit. By therapeutic benefit it is generally meant eradication or amelioration of the underlying disorder being treated. Also, a therapeutic benefit is achieved with the eradication or amelioration of one or more of the physiological symptoms or improvement in one or more clinical parameters associated with the underlying disorder such that an improvement is observed in the subject, notwithstanding that the subject may still be afflicted with the underlying disorder. For prophylactic benefit, the compositions may be administered to a subject at risk of developing a particular disease, or to a subject reporting one or more of the physiological symptoms of a disease, even though a diagnosis of this disease may not have been made.

[0058] As used herein, the term “immunotherapy” or “immunotherapeutic” generally refers to a treatment of a condition, e.g., a disease or disorder, that comprises an agent for inducing or suppressing an immune response. The agent can be an antibody, an antibody fragment, a peptide, a small molecule, a nucleic acid molecule, an aptamer, a vaccine, a peptidomimetic, or any combinations thereof. Immunotherapy takes advantages of aspects of the immune system and one or more of its cells for its effectiveness.

[0059] As used herein, an “immune response” generally refers to a response by a cell of the immune system, such as a B cell, T cell (CD4 or CD8), regulatory T cell, antigen-presenting cell, dendritic cell, monocyte, macrophage, NK T cell, NK cell, basophil, eosinophil, or neutrophil, to a stimulus. In some embodiments, the response is specific for a particular antigen (an “antigen-specific response”), and refers to a response by a CD4 T cell, CD8 T cell, or B cell via their antigen-specific receptor. In some embodiments, an immune response is a T cell response, such as a CD4+ response or a CD8+ response. Such responses by these cells can include, for example, cytotoxicity, proliferation, cytokine or chemokine production, trafficking, or phagocytosis, and can be dependent on the nature of the immune cell undergoing the response. In some embodiments, the immunotherapy can be a proinflammatory immunotherapy. In other embodiments, the immunotherapy can be an anti-inflammatory immunotherapy.

[0060] In accordance with various aspects described herein, the term “immunotherapy” refers to a treatment of a condition, e.g., a disease or disorder, comprising activation or suppression of one or more immune responses through the CTLA-4/PD-1 axis, i.e., activating or suppressing CTLA-4 activity, alone or in combination with PD-1 activities. In some embodiments, the term “immunotherapy” can further comprise activating or suppressing the functional interaction of PD-1 with its ligands, e.g., PD-L1 and/or PD-L2. In some embodiments, the term “immunotherapy” can further comprise activating or suppressing the functional interaction of CTLA-4 with its receptor(s), e.g., CD80 and/or CD86.

[0061] The term “sequencing,” as used herein, generally refers to methods and technologies for determining the sequence of nucleotide bases in one or more polynucleotides. The polynucleotides can be, for example, nucleic acid molecules such as deoxyribonucleic acid (DNA) or ribonucleic acid (RNA), including variants or derivatives thereof (e.g., single stranded DNA). Sequencing can be performed by various systems currently available, such as, without limitation, a sequencing system by Illumina®, Pacific Biosciences (PacBio®), Oxford Nanopore®, or Life Technologies (Ion Torrent®). Alternatively or in addition, sequencing may be performed using nucleic acid amplification, polymerase chain reaction (PCR) (e.g., digital PCR, quantitative PCR, or real time PCR), or isothermal amplification. Such systems may provide a plurality of raw genetic data corresponding to the genetic information of a subject (e.g., human), as generated by the systems from a sample provided by the subject. In some examples, such systems provide sequencing reads (also “reads” herein). A read may include a string of nucleic acid bases corresponding to a sequence of a nucleic acid molecule that has been sequenced. In some situations, systems and methods provided herein may be used with proteomic information.

[0062] As used herein, the term “non-wild type antigen” generally refers to an antigen that is distinct in sequence from a wild-type antigen. In some embodiments, a “non-wild type” antigen can be assessed by reference to a germ-line genome of a subject (e.g., a “non-wild type” antigen can have at least one difference in sequence from the corresponding antigen sequence encoded by the germline of a subject). In some embodiments, a “non-wild type” antigen can be assessed by reference to a population of individuals (e.g., a “non-wild type” antigen can have at least one difference in sequence of an antigen that does not occur in a population of individuals). In some embodiments, a “non-wild type” antigen can be assessed by reference to a reference genome (e.g. GRCh38.p13, GRCh37.p13, GRCh37 produced by the Genome Research Consortium). In some embodiments, the reference genome is a human reference genome. In some embodiments, a “non-wild type antigen” is a neoantigen.

[0063] As used herein, the term “neoantigen” generally refers to an antigen that has at least one alteration that makes it distinct from the corresponding wild-type, parental antigen, e.g., via mutation in a tumor cell or post-translational modification specific to a tumor cell. A neoantigen can include a polypeptide sequence or a nucleotide sequence. A mutation can include a frameshift or nonframeshift insertion or deletion (indel), missense or nonsense substitution, splice site alteration, genomic rearrangement or gene fusion, or any genomic or expression alteration giving rise to a neoORF. A mutation can also include a splice variant. Post-translational modifications specific to a tumor cell can include aberrant phosphorylation.

[0064] As used herein, the term “barcode” generally refers to a unique oligonucleotide sequence that allows a corresponding nucleic acid base and/or nucleic acid sequence, or a peptide or complex to which it is linked, to be identified. In some embodiments, the nucleic acid base and/or nucleic acid sequence is located at a specific position on a larger polynucleotide sequence or a polynucleotide linked or connected to a peptide sequence. In some embodiments, a barcode is a “unique molecular identifier” (UMI). In some embodiments, barcodes can each have a length within a range of from 4 to 36 nucleotides, or from 6 to 30 nucleotides, or from 8 to 20 nucleotides. In some embodiments, the melting temperatures of barcodes within a set are within 10° C. of one another, within 5° C. of one another, or within 2° C. of one another. In some embodiments, barcodes are members of a minimally cross-hybridizing set (e.g., the nucleotide sequence of each member of such a set is sufficiently different from that of every other member of the set that no member can form a stable duplex with the complement of any other member under stringent hybridization condition)s. In some embodiments, the nucleotide sequence of each member of a minimally cross-hybridizing set differs from those of every other member by at least two nucleotides. Example barcode technologies are described in Winzeler et al. (1999) Science 285:901; Brenner (2000) Genome Biol. 1:1 Kumar et al. (2001) Nature Rev. 2:302; Giaever et al. (2004) Proc. Natl. Acad. Sci. USA 101:793; Eason et al. (2004) Proc. Natl. Acad. Sci. USA 101:11046; and Brenner (2004) Genome Biol. 5:240 each incorporated by reference in their entireties.

[0065] As used herein the term “immune checkpoint protein” generally refers to a molecule that is expressed by a T cell that either turns up a signal (stimulatory checkpoint molecules) or turns down a signal (inhibitory checkpoint molecules). Immune checkpoint molecules are recognized to constitute immune checkpoint pathways similar to the CTLA-4 and PD-1 dependent pathways (see e.g. Pardoll, 2012. Nature Rev Cancer 12:252-264; Mellman et al, 2011. Nature 480:480-489). Examples of inhibitory checkpoint molecules include A2AR, B7-H3, B7-H4, BTLA, CTLA-4, CD277, IDO, KIR, PD-1, LAG-3, TIM-3 and VISTA. The Adenosine A2A receptor (A2AR) is regarded as an important checkpoint in cancer therapy because the tumor microenvironment has relatively high levels of adenosine, which lead to a negative immune feedback loop through the activation of A2AR. B7-H3, also called CD276, was originally understood to be a co-stimulatory molecule but is now regarded as co-inhibitory. B7-H4, also called VTCN1, is expressed by tumor cells and tumor-associated macrophages and plays a role in tumor escape. B and T Lymphocyte Attenuator (BTLA), also called CD272, is a ligand of HVEM (Herpesvirus Entry Mediator). Cell surface expression of BTLA is gradually downregulated during differentiation of human CD8+T cells from the naive to effector cell phenotype, however tumor-specific human CD8+ T cells express high levels of BTLA. CTLA-4, Cytotoxic T-Lymphocyte-Associated protein 4 and also called CD 152 is overexpressed on Treg cells serves to control T cell proliferation. IDO, Indoleamine 2,3-dioxygenase, is a tryptophan catabolic enzyme, a related immune-inhibitory enzymes. Another important molecule is TDO, tryptophan 2,3-dioxygenase. IDO has been documented to suppress T and NK cells, generate and activate Tregs and myeloid-derived suppressor cells, and promote tumor angiogenesis. KIR, Killer-cell Immunoglobulin-like Receptor, is a receptor for MHC Class I molecules on Natural Killer cells. LAG3, Lymphocyte Activation Gene-3, works to suppress an immune response by action to Tregs as well as direct effects on CD8+ T cells. PD-1, Programmed Death 1 (PD-1) receptor, has two ligands, PD-L1 and PD-L2. This checkpoint is the target of Merck & Co.'s melanoma drug Keytruda, which gained FDA approval in September 2014. An advantage of targeting PD-1 is that it can restore immune function in the tumor microenvironment. TIM-3, short for T-cell Immunoglobulin domain and Mucin domain 3, expresses on activated human CD4+ T cells and regulates Th1 and Th17 cytokines. TIM-3 acts as a negative regulator of Th1/Te1 function by triggering cell death upon interaction with its ligand, galectin-9. VISTA. Short for V-domain Ig suppressor of T cell activation, VISTA is primarily expressed on hematopoietic cells so that consistent expression of VISTA on leukocytes within tumors may allow VISTA blockade to be effective across a broad range of solid tumors.

[0066] As used herein, the term “immune checkpoint inhibitor” or “ICI” has its generally refers to any compound inhibiting the function of an immune inhibitory checkpoint protein. Inhibition can include reduction of function and full blockade. In some embodiments checkpoint inhibitors are antibodies that specifically recognize immune checkpoint proteins. Immune checkpoint inhibitors include peptides, antibodies, nucleic acid molecules and small molecules.

[0067] As used herein, the term “phage” generally encompasses a virus comprising a protein coat in which a viral genome required for viral replication is encapsulated. The viral genome can be composed of single or double stranded, linear or circular DNA or RNA. Phages can infect a wide range of host cells, including prokaryotes such as bacterial cells without limitation. Numerous phage or filamentous phage genomes have been sequenced. Representative filamentous phages include M13, fl, fd, Ifl, Ike, Xf, Pfl and Pf3. Within the class of filamentous phage, M13 is the best characterized species. Its three-dimensional structure is known and the function of its coat protein is well understood. Specifically, the M13 genome encodes five coat proteins: pIII, VIII, VI, VII and IX. In order to construct the M13-based expression vector of the present phage display system, all coat coding sequences may be deleted or modified so that the encoded protein product is exogenous on the outer surface of the phage particle. It may not be possible to bring about the presentation of the peptide. Appropriate modifications to the functional outer surface protein can result in the following: (1) Induction of the outer surface protein into the periplasm of the bacterial cell where the signal peptide is then cleaved away (2) loss of function of the coat protein domain that anchors the mature polypeptide to the bacterial cell membrane and/or phage coat; Loss of function of the specifically bound coat protein; and/or (4) introduction of an internal stop codon to prevent expression of any functional coat protein. These and other domains within multiple coat proteins such as pIII have already been described (see, eg, U.S. Pat. No. 5,969,108). Other closely related member outer surface proteins, such as fl and fd filamentous phage, are also well known in the art (eg, Kay et al. (1996), peptide and protein phages). Display: Laboratory Manual, Academic Press., Inc. San Diego). Preferably, the only phage sequence displayed in the M13-based expression vector contains the fl origin required for phagemid replication and packaging. Step-by-step illustrations for the construction of M13-based expression vectors are detailed in Examples 1-4. Thus, those skilled in the art can easily construct an expression vector having the features described in the claims without undue experimentation.

[0068] Similar constructions can be performed using other filamentous phages. Pf3 is another well known filamentous phage that infects Pseudomonas aerugenosa cells containing the IncP-1 plasmid. The entire genome of Pf3 has been sequenced and the genetic signals involved in replication and assembly have been characterized (Luiten et al. (1985) J. Virology 56 (1): 268-276). The main coat protein of Pf3 is unusual in that it does not have any signal peptide to direct its secretion. The sequence has charged residues ASP 7, ARG 37, LYS 40 and PHE 44 —COO— consistent with the exposed amino terminus. The origin of viral strand replication of 139 bp DNA for Pf3 phage was also identified (Luiten et al. (199) J. Bacteriol 173 (13): 4007-4012). In order to construct a Pf3-based expression vector, the Pf3 coat coding sequence may be deleted or modified in a manner that does not encode any functional major coat protein. Preferred expression vectors contain only a Pf3 phage origin of replication for their replication and packaging.

[0069] The same approach applies to the construction of phagemid vectors derived from non-filamentous phage. Non-limiting representative members of this class of phage are bacteriophages yX174, X, T4 and T7. Bacteriophage yX174 is a very small icosahedral virus that has been thoroughly studied by genetics, biochemistry and electron microscopy. Three gene products of yX174 are present outside the mature virion, namely F (capsid), G (major spike protein, 60 copies per virion), and H (non-major spike protein, 12 copies per virion). Protein G contains 175 amino acids while H contains 328 amino acids. Protein F interacts with the single-stranded DNA of the virus. Proteins F, G and H are translated from a single mRNA in cells infected with the virus. Thus, examples of expression vectors based on this class of non-filamentous phage lack the coding sequences for any of the F, G and H proteins. Other alternative expression vectors include modified F, G or H coding sequences that do not yield functional proteins F, G and H.

[0070] In some embodiments, the nucleic acids used in methods described herein can be amplified. Amplification can be performed at any point during a multi reaction procedure, e.g., before or after pooling of sequencing libraries from independent reaction volumes and may be used to amplify any suitable target molecule described herein.

[0071] Amplification can be performed by any suitable method. The nucleic acids may be amplified by polymerase chain reaction (PCR), as described in, for example, U.S. Pat. Nos. 5,928,907 and 6,015,674, hereby incorporated by reference for any purpose. Other methods of nucleic acid amplification may include, for example, ligase chain reaction, oligonucleotide ligations assay, and hybridization assay, as described in greater detail in U.S. Pat. Nos. 5,928,907 and 6,015,674, incorporated by reference in their entirety. Real-time optical detection systems are also known in the art, as also described in greater detail in, for example, U.S. Pat. Nos. 5,928,907 and 6,015,674, incorporated herein above. Other amplification methods that can be used herein include those described in U.S. Pat. Nos. 5,242,794; 5,494,810; 4,988,617; and 6,582,938, all of which are incorporated herein in their entirety. Other amplification techniques that can be used with methods of the present disclosure can include, e.g., AFLP (amplified fragment length polymorphism) PCR (see e.g.: Vos et al. 1995. AFLP: a new technique for DNA fingerprinting. Nucleic Acids Research 23: 4407-14), allele-specific PCR (see e.g., Saiki. R K, Bugawan T L, Horn G T, Mullis K B, Erlich H A (1986). Analysis of enzymatically amplified beta-globin and HLA-DQ alpha DNA with allele-specific oligonucleotide probes Nature 324: 163-166), Alu PCR, assembly PCR (see e.g., Stemmer W P, Crameri A, Ha K D, Brennan T M, Heyneker H L (1995). Single-step assembly of a gene and entire plasmid from large numbers of oligodeoxyribonucleotides Gene 164: 49-53), assymetric PCR (see e.g., Saiki R K supra); colony PCR, helicase dependent PCR (see e.g., Myriam Vincent, Yan Xu and Huimin Kong (2004). Helicase-dependent isothermal DNA amplification EMBO reports 5 (8): 795-800), hot start PCR, inverse PCR (see e.g., Ochman H, Gerber A S, Hard D L. Genetics, 1988 November; 120(3):621-3), in situ PCR, intersequence-specific PCR or IS SR PCR, digital PCR, linear-after-the-exponential-PCR or Late PCR (see e.g., Pierce K E and Wangh L T (2007). Linear-after-the-exponential polymerase chain reaction and allied technologies Real-time detection strategies for rapid, reliable diagnosis from single cells (Methods Mol. Med. 132: 65-85), long PCR, nested PCR, real-time PCR, duplex PCR, multiplex PCR, quantitative PCR, quantitative fluorescent PCR (QF-PCR), multiplex fluorescent PCR (MF-PCR), restriction fragment length polymorphism PCR (PCR-RFLP), PCK-RFLPIRT-PCR-IRFLP, polony PCR, in situ rolling circle amplification (RCA), bridge PCR, picotiter PCR, and emulsion PCR, or single cell PCR. Other suitable amplification methods can include transcription amplification, self-sustained sequence replication, selective amplification of target polynucleotide sequences, consensus sequence primed polymerase chain reaction (CP-PCR), arbitrarily primed polymerase chain reaction (AP-PCR), and degenerate oligonucleotide-primed PCR (DOP-PCR). Another method for achieving the result of an amplification of nucleic acids is known as the ligase chain reaction (LCR), nucleic acid sequence-based amplification (NASBA), Q-beta-replicase method, 3SR (see for example Fahy et al. PCR Methods Appl. 1:25-33 (1991)), or Transcription Mediated Amplification (TMA) used by Gen-Probe. TMA is similar to NASBA in utilizing two enzymes in a self-sustained sequence replication. See U.S. Pat. No. 5,299,491 herein entirely incorporated by reference. Other methods for amplification of nucleic acids can include Strand Displacement Amplification (SDA) (Westin et al 2000, Nature Biotechnology, 18, 199-202; Walker et al 1992, Nucleic Acids Research, 20, 7, 1691-1696), or Rolling Circle Amplification (RCA) (Lizardi et al. 1998, Nature Genetics, 19:225-232).

[0072] In some embodiments, amplification methods can be, for example, solid-phase amplification, polony amplification, colony amplification, emulsion PCR, bead RCA, surface RCA, or priorsurface SDA. In some embodiments, amplification methods that results in amplification of free DNA molecules in solution or tethered to a suitable matrix by one end of the DNA molecule can be used. Methods that rely on bridge PCR, where both PCR primers are attached to a surface (see, e.g., WO 2000/018957 and Adessi et al., Nucleic Acids Research (2000): 28(20): E87) can be used. In some cases the methods of the disclosure can create a “polymerase colony technology,” or “polony.” referring to a multiplex amplification that maintains spatial clustering of identical amplicons (see Harvard Molecular Technology Group and Lipper Center for Computational Genetics website). These include, for example, in situ polonies (Mitra and Church, Nucleic Acid Research 27, e34, Dec. 15, 1999), in situ rolling circle amplification (RCA) (Lizardi et al., Nature Genetics 19, 225, July 1998), bridge PCR (U.S. Pat. No. 5,641,658), picotiter PCR (Leamon et al., Electrophoresis 24, 3769, November 2003), and emulsion PCR (Dressman et al., PNAS 100, 8817, Jul. 22, 2003).

[0073] Amplification may be achieved through any process by which the copy number of a target sequence is increased, e.g., PCR. Conditions favorable to the amplification of target sequences by PCR are known in the art, can be optimized at a variety of stages in the process, and depend on characteristics of elements in the reaction, such as target type, target concentration, sequence length to be amplified, sequence of the target and/or one or more primers, primer length, primer concentration, polymerase used, reaction volume, ratio of one or more elements to one or more other elements, and others, some or all of which can be altered. In general, PCR involves denaturation of the target to be amplified (if double stranded), hybridization of one or more primers to the target, and extension of the primers by a DNA polymerase, with the stages repeated (or “cycled”) in order to amplify the target sequence. Stages in this process can be optimized for various outcomes, such as to enhance yield, decrease the formation of spurious products, and/or increase or decrease specificity of primer annealing. Methods of optimization are well known in the art and include adjustments to the type or amount of elements in the amplification reaction and/or to the conditions of a given stage in the process, such as temperature at a particular stage, duration of a particular stage, and/or number of cycles. In some embodiments, an amplification reaction comprises at least 5, 10, 15, 20, 25, 30, 35, 50, or more cycles. In some embodiments, an amplification reaction comprises no more than 5, 10, 15, 20, 25, 35, 50, or more cycles. Cycles can contain any number of stages, such as 1, 2, 3, 4, 5, 6, 7, 8, 9, 10 or more stages. Stages can comprise any temperature or gradient of temperatures, suitable for achieving the purpose of the given stage, including but not limited to, 3′ end extension (e.g., adaptor fill-in), primer annealing, primer extension, and strand denaturation. Stages can be of any duration, including but not limited to about, less than about, or more than about 1, 5, 10, 15, 20, 25, 30, 35, 40, 45, 50, 55, 60, 70, 80, 90, 100, 120, 180, 240, 300, 360, 420, 480, 540, 600, or more seconds, including indefinitely until manually interrupted. Cycles of any number comprising different stages can be combined in any order. In some embodiments, different cycles comprising different stages are combined such that the total number of cycles in the combination is about, less that about, or more than about 5, 10, 15, 20, 25, 30, 35, 50, or more cycles.

### I. Overview

[0074] The adaptive immune system is an extraordinarily elegant and diverse system for defending the body against foreign beings and substances, and identifying “self” from “non-self” to eliminate potential threats. One class of immune cells that are trained to carry out this surveillance mechanism are lymphocytes, which include cells that develop in the bone marrow (B cells) and in the thymus (T cells). Lymphocytes are developed and matured in a process of positive and negative selection-positive selection to ensure expression of the (and sufficiently sensitive) immune receptor proteins, and negative selection to deplete “autoreactive” subclones of lymphocytes that, if allowed to propagate and expand, may lead to autoimmune conditions.

[0075] It follows that the recognition of “non-self” by antibodies, which derive from B cells and their plasma cell progeny, is promoted by the process of negative selection (otherwise referred to as “central tolerance”), and likewise the antibody recognition of “self” impeded. For example, foreign antigens expressed by microbial pathogens, including viruses or bacteria, are recognized with relative ease given their evolutionary distance and high degree of dissimilarity from human biology and human antigens. In contrast, human “self” antigens are recognized with decreasing capacity, and antibody immune responses are raised against self-antigen targets expressed in normal tissue with less frequency—these antibodies are referred to as “autoantibodies,” and can be characteristic of particular autoimmune conditions.

[0076] However, in-between self and non-self, and in-between human biology and pathogenic microbiology, lies a different class of invader who in some aspects exhibits particular hallmarks of human biology, and yet in others diverges profoundly from the tenets of genomic regulation and homeostatic stability characteristic of normal human cellular behavior: cancer. Cancer cells derive from our own cells, and yet follow a pathway of evolutionary divergence and insatiable proliferation that has no checkpoints, no milestones, and no defined destination. The signs of this departure may be observed in an ever-increasing trend of genetic dissimilarity of cancer cells from their wild type neighbors and ancestors-indeed, malignant cells in cancer are driven by many diverse influences and selective forces, including methods of immune evasion and explosive, competitive growth and colonization, to develop a diverse array of mutations that may asymmetrically rewire their capabilities and push the limits of their immortality. These mutations include silent mutations, coding mutations, insertions and deletions, frameshift variants, gene fusions, alternative splicing, and other fundamental genetic shifts and highly complex rearrangements. Although genetic mutations do not develop exclusively in cancer, and can be observed in other diseases and even normal or pre-neoplastic tissue, cancer represents the crucible of genetically driven growth and selection in which the landscape of multifarious genetic mutations are explored in the most unconstrained fashion.

[0077] As tumor cells diverge further and further from the wild type, it is apparent that that an immune response in which antibodies are raised against the tumor-associated or tumor-specific aberrations has utility. At one time it was thought that the anti-tumor immune response was fundamentally handicapped by the relative genetic identity between cancer and normal tissue. In spite of decades of seminal research and proofs of concept in the cancer immunology field, immunotherapy remained on the fringes as many questioned the potential of immunotherapeutics to provide safe and productive therapeutic benefit for cancer patients. However, breakthroughs in T cell research proved that the inhibition of two particular immune checkpoints, which are considered to exist in order to limit autoimmune responses by T cells, may release the brakes on the immune system to effect an anti-tumor response. In fact, further research revealed that the mechanism by which T cells recognize cancer cells, and effectively distinguish self from non-self, is through the recognition of small peptide fragments of proteins and genes mutated in cancer, comprising the diverse array of unique mutations that cancer cells exploit to their selective growth benefit, and evidently also to their peril.

[0078] These findings have led to a new era of immuno-oncology, and a new standard of care for cancer treatment in which the immune system is stimulated to aggressively target and destroy cancer cells using immune checkpoint inhibitors (ICI). The approval of Ipilimumab in 2011 for treating metastatic melanoma set off a race to advance assets related to immune checkpoint blockade, and Anti-PD-1 and Anti-PD-L1 approvals followed soon thereafter, including for Pembrolizumab and Nivolumab. These monoclonal antibody, T cell modulatory therapies have been proven effective for treating many advanced stage, metastatic cancers, with durable survival benefits for select patients. However, in spite of the profound impacts of ICI treatments, there may be significant limitations to their use. As few as 1 in 9 patients respond to ICI treatment, and at least half of ICI patients experience toxic autoimmune side effects which may be life-threatening or fatal. Indeed, while inhibiting immune checkpoints may stimulate or boost an underlying anti-tumor response, it also inadvertently permits the type of immune activity which those checkpoints were evolved to prevent: autoimmune reactivity. Although certain biomarkers of ICI treatment efficacy have been developed (including PD-L1 immunohistochemistry, tumor mutational burden, and microsatellite instability), their sensitivities and specificities are limited, preventing patients from better assessing their likelihood to benefit, versus their likelihood of autoimmune adverse events. Indeed, no clinical biomarker exists for predicting ICI toxicities, leaving patients and clinicians uncertain of their likelihood or risks.

[0079] However, the development and widespread clinical adoption of these T cell mediated ICI therapies has also spurred interest in an adjacent pathway: B cell and antibody immune responses. While autoantibodies are a classical biomarker of autoimmune disorders and cancer, recent research has revealed that B cells concentrate in tertiary lymphoid structures (TLS) adjacent to malignancies in cancer, and that TLS formation may be prognostic for productive immune responses and anti-tumorigenic outcomes in patients undergoing ICI treatment. Moreover, studies in melanoma patients have revealed that, within the B cell lineage, differentiation into plasma cells, which secrete the antibodies that are bound to the B cell membrane as receptor proteins, is noted in patients undergoing ICI treatment and responding to ICI therapy. These findings seem to suggest and clarify that, on the spectrum of self to non-self, between the native self-antigens in human biology and the foreign antigens of microbial pathogens, plants, and other species, anti-tumorigenic antibody responses may not simply underlie ICI immunotherapeutic responses, but also may serve to address the shortcomings in ICI efficacy. By nominating new biomarkers for ICI outcome prediction, and also prioritizing new antigenic targets and antibodies that natively drive immune responses in certain patients, antibodies provide a novel and generalizable modality to promote better therapeutic efficacy in a wider population.

[0080] Although antibodies and B cell responses hold exciting potential for precision medicine and therapeutic discovery, antibody responses in cancer have focused on antibodies that are tumor associated, but not necessarily tumor-specific. Tumor-associated antibodies are known to arise in response to dysregulation of expression of particular self-proteins, including classical oncogenes (e.g. KRAS) and tumor-associated antigens (e.g. NY-ESO-1). Existing immunoassay technologies (e.g. ELISA, protein microarrays) are limited in their ability to profile the binding affinities of antibodies against the vast universe of novel epitopes that arise from somatic, neoantigenic variation in cancer. However, new advances in the synthetic biology field, including with technologies such as DNA synthesis, DNA sequencing, bioinformatics, and machine learning, today enable a more powerful immunoassay capable of assaying the tumor-specific antibody responses by representing a vast diversity of somatic, neoantigenic variation known to arise in cancer. This approach provides a method for capturing antibody responses and better characterizing activity in the B cell compartment that is now known to exist, but for which the targets and mechanisms remain to be elucidated. The methods, systems, and compositions provided herein may overcome these challenges, using an NGS-based immunoassay.

[0081] This disclosure provides methods, systems, and compositions to canvass the landscape of antibodies that may arise and influence outcomes for cancer immunotherapy patients, owing to the unprecedented throughput of a novel NGS-based technology. By integrating experimental and computational techniques, the present disclosure has unique research value, and commercial promise, to address major unmet needs in precision medicine and therapeutic discovery.

### II. Example Embodiments

[0082] The present disclosure provides antigen libraries on peptide display platforms for screening, interrogating, and profiling antibody immune responses. In addition to the use of wild type protein sequences in the antigens, the present disclosure may use antigens with new somatic alterations to the wild type protein sequences. The antigen library may explicitly represent somatic variant peptide epitopes to profile the humoral immune response to neoantigens and autoantigens.

[0083] The present disclosure provides methods, systems compositions for performing high throughput antibody profiling. The methods, systems, and compositions may be used to perform immunoprecipitation-based NGS immunoassays, such as phage immunoprecipitation sequencing (PhIP-Seq). The peptide display library may comprise more than 500,000 different polypeptides. The peptide display library may comprise more than 750,000 different polypeptides. The peptide display library may comprise more than 1,000,000 different polypeptides. The peptide display library may comprise more than 1,250,000 different polypeptides. The peptide display library may comprise more than 1,500,000 different polypeptides. The peptide display library may comprise more than 1,750,000 different polypeptides. The peptide display library may comprise more than 2,000,000 different polypeptides.

[0084] The methods, systems and compositions as provided herein may use cohorts of patients to profile ICI antibodies. For example, the cohorts of patients may be greater than 100 patients. The cohorts of patients may be greater than 150 patients. The cohorts of patients may be greater than 200 patients. The cohorts of patients may be greater than 250 patients. The cohorts of patients may be greater than 300 patients. The cohorts of patients may be greater than 250 patients. The cohorts of patients may be greater than 400 patients. The cohorts of patients may be greater than 250 patients. The cohorts of patients may be greater than 500 patients. The size of the cohort may allow the prediction of the efficacy or toxicity of the ICI treatments to be more accurate compared to the predictions derived from a smaller cohort.

[0085] The methods, systems, and compositions, may comprise using programmable bacteriophage display or PhIP-Seq, using vast oligonucleotide libraries to create many polypeptides by bacteriophage display, which serve as antibody epitopes. To quantify antibody levels, a biospecimen (e.g. serum or plasma from a patient's blood sample) may be mixed with the peptide display library, and antibodies are pulled down by immunoprecipitation. Then, bacteriophage DNA “barcodes” are NGS sequenced, giving a readout of the corresponding antibodies.

[0086] The present disclosure may provide a method of developing an antibody profile of an immune response, comprising using an epitope of a non-wild type antigen to identify an antibody from a sample of a subject exhibiting said immune response. The method may further comprise using the antibody identified to generate the antibody profile.

[0087] Development of the antibody profile may further comprise contacting the sample of the subject with a peptide display library under conditions sufficient to permit precipitation of the antibody from the sample to yield a complex. The precipitation of the antibody may permit the characterization of the antibody. For example, the complex may comprise a nucleic acid barcode sequence and the antibody. The peptide library may comprise a nucleic acid barcode sequence and the antibody. The barcode sequence may be unique to a given peptide and be used to identify the peptide and the library, thereby allowing identification of the antibody. The methods may further comprise identifying the antibody.

[0088] The present disclosure provides a method of developing an antibody profile of an immune response, comprising (a) contacting a sample of a subject with a peptide display library under conditions sufficient to permit precipitation of an antibody from the sample to yield a complex comprising a nucleic acid barcode sequence, the sequence which encodes and uniquely identifies a given protein or peptide antibody target displayed by the expression vector, and the antibody, wherein the peptide display library comprises non-wild type epitopes of antibodies; (b) identifying the nucleic acid barcode sequence, thereby identifying the antibody target; and (c) using the antibody target identified in (c) to generate an antibody target repertoire.

[0089] The present disclosure provides methods for predicting or monitoring a response of a subject having or suspected of having a disease, comprising: (a) obtaining a sample from a subject; (b) contacting the sample with a peptide display library comprising a plurality of non-wild type epitopes of antibodies under conditions sufficient to form a complex comprising an antibody from the sample coupled to a non-wild type epitope of an antibody from the plurality of non-wild type epitopes of antibodies; (c) identifying the antibody target of (b); (d) processing the antibody identified in (c) against an antibody profile of a therapeutic immune response to generate an output indicative of (i) a predicted response of the subject to the therapeutic for the disease, (ii) a progression or regression of the disease in response to the subject having received the therapeutic, or (iii) autoimmune toxicity or immune related adverse events in response to the subject with the disease having received the therapeutic.

[0090] The present disclosure provides a method for predicting or monitoring a response of a subject having or suspected of having a disease, comprising (a) using a non-wild type epitope of an antibody to identify an antibody from a sample of a subject, and (b) processing the antibody identified in (a) against an antibody profile to (i) predict a response of the subject to the therapeutic for the disease, (ii) monitor a progression or regression of the disease in response to the subject having received the therapeutic, (iii) predict an autoimmune toxicity or immune related adverse event in response to the subject with the disease having received the therapeutic, or (iv) monitor an autoimmune toxicity or immune related adverse event in response to the subject with the disease having received the therapeutic.

[0091] In various methods disclosed herein, a complex is formed or may be formed. The methods may further comprise subjecting the generated complex to nucleic acid amplification under conditions sufficient to amplify the complex. For example, the complex may comprise nucleic acids and the amplification may allow the concentration of the nucleic acids to be increased. The amplification reaction may allow the nucleic acids to be sequenced, for example by increasing the concentration, or by appending sequencing to allow the interaction of the nucleic acid with a flow cell or other sequencing apparatus. The methods may comprise identifying the sequences by using a next-generation sequencer. The sequences of the amplified complex may be used to generate the therapeutic immune response profile. For example, the generation of sequence reads may be used to identify the sequence. The sequence reads may then be mapped or otherwise correlated to the specific antibody. By analyzing the sequence reads of the amplified complex, the antibodies present may be determined and a therapeutic response profile may be generated.

[0092] The sequence of the amplified complex may be compared with an antibody profile of a therapeutic to generate an output indicative of (i) a predicted response of the subject to the therapeutic for the disease, (ii) a progression or regression of the disease in response to the subject having received the therapeutic, or (iii) autoimmune toxicity or immune related adverse events in response to the subject with the disease having received the therapeutic. A predicted response of the subject to the therapeutic for the disease may be in respect to a tissue of the subject. The predicted response of the subject to the therapeutic for the disease may be with respect to an organ of the subject.

[0093] The peptide display library used in various aspects described herein may have a specific epitope. The peptide display library may comprise a non-wild type epitope of the antibody. The peptide display library may comprise a wild type epitope of an antibody. The non-wild type epitope may be a somatic single amino acid substitution variants, insertion-deletion variants, or structural variants including gene fusions or splicing junctions that may arise in a tumor or neoplasm.

[0094] In various aspects an antibody profile is generate based on the immune response to a therapeutic or a treatment. The therapeutic may be a cancer therapeutic. The therapeutic may be an immune checkpoint inhibitor. In some cases the therapeutic may be selected from the group consisting of a therapy targeted against PD-1, PD-L1, CTLA-4, a Tumor-Associated Antigen (TAA), a Neoantigen, a SEREX Antigen, CD19, HER2, STAT3, IDO, NY-ESO-1, CD40, CSF1R, BCMA, MUC1, ADORA2A, CD20, GD2, TLR7, WT1, IFNAR1, CD47, EGFR, LAG-3, OX40, PSMA, Mesothelin, TERT, TLR, TLR9, 4-1BB, IL2R, TLR4, CD33, GITR, HPV E6, Survivin, CD123, TIGIT, TIM-3, CD73, HPV E7, TLR3, CD38, EBV, STING, CD22, GPC3, HDAC1, CXCR4, GMCSFR, CD30, CEACAM5, HDAC6, HPV, CD3, MAGE-A3, TNF, PSA, CD25, CEA, EPCAM, CMV, IL12, PRAME, IL12R, 5T4, Beta Catenin, CCR2, PMEL, CXCL12, IGF1, CD46, CXCR1, GMCSF, IL15R, ROR1, TGFBR2, CCR4, FLT-3, FOLR1, GCSFR, ICOS, JAK2, KRAS, VISTA, CD133, CD27, CD39, CEACAM6, NKG2D, STAT5, TGFB1, TLR2, USP7, ANG1, ANG2, B7-H3, CLEC12A, IL13RA2, RIG-1, TRP2, VEGF, AFP, Alpha-Gal, COX-2, EPHA2, gp96, MUC16, p53, TGF-β, CD138, CDw136, CS1, CXCR2, EGFRvIII, Gelactin-3, Globo H, GR, IFNAR2, IFNGR1, IL6, JAK1, MLANA, RAS, SLAMF7, TDO, TGFB2, TLR8, ALK, Arginase, CCR1, CD56, CD70, FAP, GD3, IDH1, IL6R, IRAK4, MAGE-A4, MERTK, MIF, PSCA, PTGER4, SIRPA, TGFB, TGFBR1, ACPP, ADORA2B, AR, Brachyury, CA19-9, CD32, CEACAM1, Gastrin, HDAC, HPV L2, IFNAR, IFNGR, IGF1R, IGF2, IL15, IL17R, IL1B, IL7R, JAK, MAGE-A, MAGE-A1, MAGE-A6, P38, RORC, TLR5, VEGFR2, ADORA3, ATRT, B7-H4, c-KIT, CCR7, CD11b, CD135, CD171, CD174, CDH3, CX3CR1, Gelactin-1, GM3, HLA-A2, HSP70, IL10, IL17, IL2RB, JAK3, MDA5, NKG2A, PBF, PVRIG, SPAM1, URLC10, VEGFR1, ABCB5, ADABP, ADAM17, ADP, AEG1, Alpha-lactalbumin, AMHR2, Angiogenesis, ASPH, AXL, BCL2, BTE6-LX-8b, BTE6-X-15-7, Carbohydrate Antigen, CCL20, CCL3, CCNB1, CD147, CD155, CD16, CD162, CD16a, CD200, CD21, CD28, CD44, CD52, CD54, CD7, CD80, CD88, Claudin 18, cMET, COX2, CSF1, CTCFL, CXCR5, CXCR7, E1A, EIF2AK3, ERG, FGF2, FN1, GC, GM2, gpA33, HBV, Hemagglutinin, HER3, HILPDA, HLA-DR, HMW-MAA, HP59, HPV 16, HPV E6/7, HPV L1, HSP105, HSP65, HVEM, Hyaluronan, IL13RA1, IL2, IL21R, ILDR2, IL8, KIF20A, KIR2DL1, KIR2DL3, LXR, MAGE-A10, MAGE-C2, Mammaglobin A, MAPK, MICA, MiHA, MMP-11, MVP, Myeloblastin, N-Myc, NKp46, NLRP3, NR2F6, Oncofetal Antigen, P2RX7, RhoC, SIM-2, SSTR2, SSX2, STAT1, STn, TAG72, TAMA, TFDP3, TGFBR, TSA, TYK2, Tyrosinase, VEGFA, Ecto 5′ Nucleotidase, CD73, NT5E, ADAM9, Adenosine, AIM2, B7-H6, BAFF-R, BAI1, BARD1, BOB-1, CA9, Cancer Testis Antigen (CTA), CB2, CBLB, CCR9, CD13, CD130, CD150, CD160, CD200R1, CD267, CD29, CD3E, CD4, CD51, CD8, Claudin 6, CLEC2D, COX, COX-1, CPEB4, CPEG4, CRBN, CRLF2, CSPG4, CTA, CXCL1, CXCR3, Cytosine Deaminase, DCK, DKK1, DLL3, DR3, DR5, EBNA3C, EGF, EGFR5, ELVAL4, EPHA3, EPS8, EVI1, FAIM-3, FasR, FCU1, FLT3, FOLR, FOXM1, FSHR, Galectin-3, GalNAc, GARP, Gelactin-9, Gelatcin-1/3/9, GLD18, GNRHR, GP160, GP73, H3.3K27M, HAGE, HDAC2, HDAC8, HPV16 E6, HPV16 E7, HSP, Hypoxia Pathway, ICAM, ICAM7, IDO1, IFNG, IFNGR2, IGF2R, IGFBP2, IGK@, IL10RA, IL12RB1, IL13, IL13R, IL13Ralpha2, IL15RA, IL17A, IL17B, IL18, ILIA, IL1R1, IL 1R3, IL21, IL22R, IL27R, IL2RA, IL35, IL9R, Integrin Beta-7, IRAK1, ITGB5, Kappa Myeloma Antigen, KIR2DL2, Kynurenine, L1CAM, Lambda Myeloma Antigen, LAMP, LLO, LXRA, LXRB, Mas Receptor, MG7, MHCI, MHCII, MIC, MOSPD2, MRP-3, MRP1, MRP3765, muGNTP01, MYB, MYBL2, NFAT, NGcGM3, Nrf2, p38 MAP Kinase, P55, PAM4, PAP, PASD1, PCDH18, PD-L2, PI3K-delta, POTE, PPT, Protein Tolemerase, PTGER2, RANKL, RBL001, RNF43, ROR2, S100A9, SLAMF1, STAT, TACSTD2, TASTD2, TDO2, TEM, Thymidine Kinase, Thymidylate Synthase, TIE2, TIMP3, TM4SF5, TOP1, TRBC1, TRBC2, TRIF, Tryptophan, TSHR, TWEAK, UTA2-1, VDBP, VRP, VSIG-4, XAGE1, XAGE1A, ZP1, or ZP3. The therapy can comprise a biologic, small molecule, cell therapy, vaccine, monoclonal antibody, antibody-drug conjugate, tumor infiltrating cell therapy, chimeric antigen receptor cell therapy, polyspecific antibody, organoid, targeted therapy, immunotherapy, surgery, radiotherapy, chemotherapy, stem cell therapy.

[0095] In various aspects a subject is treated, and an autoimmune profile is generated. The subject may have cancer. The subject may be administered a therapeutic. The subject may have received treatment selected from the group consisting of treatment targeted against PD-1, PD-L1, CTLA-4, a Tumor-Associated Antigen (TAA), a Neoantigen, a SEREX Antigen, CD19, HER2, STAT3, IDO, NY-ESO-1, CD40, CSF1R, BCMA, MUC1, ADORA2A, CD20, GD2, TLR7, WT1, IFNAR1, CD47, EGFR, LAG-3, OX40, PSMA, Mesothelin, TERT, TLR, TLR9, 4-1BB, IL2R, TLR4, CD33, GITR, HPV E6, Survivin, CD123, TIGIT, TIM-3, CD73, HPV E7, TLR3, CD38, EBV, STING, CD22, GPC3, HDAC1, CXCR4, GMCSFR, CD30, CEACAM5, HDAC6, HPV, CD3, MAGE-A3, TNF, PSA, CD25, CEA, EPCAM, CMV, IL12, PRAME, IL12R, 5T4, Beta Catenin, CCR2, PMEL, CXCL12, IGF1, CD46, CXCR1, GMCSF, IL15R, ROR1, TGFBR2, CCR4, FLT-3, FOLR1, GCSFR, ICOS, JAK2, KRAS, VISTA, CD133, CD27, CD39, CEACAM6, NKG2D, STAT5, TGFB1, TLR2, USP7, ANG1, ANG2, B7-H3, CLEC12A, IL13RA2, RIG-1, TRP2, VEGF, AFP, Alpha-Gal, COX-2, EPHA2, gp96, MUC16, p53, TGF-β, CD138, CDw136, CS1, CXCR2, EGFRvIII, Gelactin-3, Globo H, GR, IFNAR2, IFNGR1, IL6, JAK1, MLANA, RAS, SLAMF7, TDO, TGFB2, TLR8, ALK, Arginase, CCR1, CD56, CD70, FAP, GD3, IDH1, IL6R, IRAK4, MAGE-A4, MERTK, MIF, PSCA, PTGER4, SIRPA, TGFB, TGFBR1, ACPP, ADORA2B, AR, Brachyury, CA19-9, CD32, CEACAM1, Gastrin, HDAC, HPV L2, IFNAR, IFNGR, IGF1R, IGF2, IL15, IL17R, IL1B, IL7R, JAK, MAGE-A, MAGE-A1, MAGE-A6, P38, RORC, TLR5, VEGFR2, ADORA3, ATRT, B7-H4, c-KIT, CCR7, CD11b, CD135, CD171, CD174, CDH3, CX3CR1, Gelactin-1, GM3, HLA-A2, HSP70, IL10, IL17, IL2RB, JAK3, MDA5, NKG2A, PBF, PVRIG, SPAM1, URLC10, VEGFR1, ABCB5, ADABP, ADAM17, ADP, AEG1, Alpha-lactalbumin, AMHR2, Angiogenesis, ASPH, AXL, BCL2, BTE6-LX-8b, BTE6-X-15-7, Carbohydrate Antigen, CCL20, CCL3, CCNB1, CD147, CD155, CD16, CD162, CD16a, CD200, CD21, CD28, CD44, CD52, CD54, CD7, CD80, CD88, Claudin 18, cMET, COX2, CSF1, CTCFL, CXCR5, CXCR7, ElA, EIF2AK3, ERG, FGF2, FN1, GC, GM2, gpA33, HBV, Hemagglutinin, HER3, HILPDA, HLA-DR, HMW-MAA, HP59, HPV 16, HPV E6/7, HPV L1, HSP105, HSP65, HVEM, Hyaluronan, IL13RA1, IL2, IL21R, ILDR2, IL8, KIF20A, KIR2DL1, KIR2DL3, LXR, MAGE-A10, MAGE-C2, Mammaglobin A, MAPK, MICA, MiHA, MMP-11, MVP, Myeloblastin, N-Myc, NKp46, NLRP3, NR2F6, Oncofetal Antigen, P2RX7, RhoC, SIM-2, SSTR2, SSX2, STAT1, STn, TAG72, TAMA, TFDP3, TGFBR, TSA, TYK2, Tyrosinase, VEGFA, Ecto 5′ Nucleotidase, CD73, NTSE, ADAM9, Adenosine, AIM2, B7-H6, BAFF-R, BAI1, BARD1, BOB-1, CA9, Cancer Testis Antigen (CTA), CB2, CBLB, CCR9, CD13, CD130, CD150, CD160, CD200R1, CD267, CD29, CD3E, CD4, CD51, CD8, Claudin 6, CLEC2D, COX, COX-1, CPEB4, CPEG4, CRBN, CRLF2, CSPG4, CTA, CXCL1, CXCR3, Cytosine Deaminase, DCK, DKK1, DLL3, DR3, DR5, EBNA3C, EGF, EGFR5, ELVAL4, EPHA3, EPS8, EVI1, FAIM-3, FasR, FCU1, FLT3, FOLR, FOXM1, FSHR, Galectin-3, GalNAc, GARP, Gelactin-9, Gelatcin-1/3/9, GLD18, GNRHR, GP160, GP73, H3.3K27M, HAGE, HDAC2, HDAC8, HPV16 E6, HPV16 E7, HSP, Hypoxia Pathway, ICAM, ICAM7, IDO1, IFNG, IFNGR2, IGF2R, IGFBP2, IGK@, IL10RA, IL12RB1, IL13, IL13R, IL13Ralpha2, IL15RA, IL17A, IL17B, IL18, IL1A, IL1R1, IL1R3, IL21, IL22R, IL27R, IL2RA, IL35, IL9R, Integrin Beta-7, IRAK1, ITGB5, Kappa Myeloma Antigen, KIR2DL2, Kynurenine, L1CAM, Lambda Myeloma Antigen, LAMP, LLO, LXRA, LXRB, Mas Receptor, MG7, MHCI, MHCII, MIC, MOSPD2, MRP-3, MRP1, MRP3765, muGNTP01, MYB, MYBL2, NFAT, NGcGM3, Nrf2, p38 MAP Kinase, P55, PAM4, PAP, PASD1, PCDH18, PD-L2, PI3K-delta, POTE, PPT, Protein Tolemerase, PTGER2, RANKL, RBL001, RNF43, ROR2, S100A9, SLAMF1, STAT, TACSTD2, TASTD2, TDO2, TEM, Thymidine Kinase, Thymidylate Synthase, TIE2, TIMP3, TM4SF5, TOP1, TRBC1, TRBC2, TRIF, Tryptophan, TSHR, TWEAK, UTA2-1, VDBP, VRP, VSIG-4, XAGE1, XAGE1A, ZP1, or ZP3. The therapy can be a biologic, small molecule, cell therapy, vaccine, monoclonal antibody, antibody-drug conjugate, tumor infiltrating cell therapy, chimeric antigen receptor cell therapy, polyspecific antibody, organoid, targeted therapy, immunotherapy, surgery, radiotherapy, chemotherapy, or stem cell therapy.

[0096] In some aspects, the present disclosure provides for a method of detecting an antibody repertoire. An antibody repertoire can provide information on the number of antibodies with distinct binding specificities present in a sample, or the number of different targets bound by antibodies present in a sample.

[0097] The method can comprise contacting a sample from a subject with a peptide display library under conditions sufficient to permit binding of an antibody from said sample to a non-wild type antigen within said peptide display library to yield a complex comprising said non-wild type antigen coupled to said antibody. The method can further comprise identifying said non-the type antigen. The method can further comprise using said non-wild type antigen identified to identify said antibody.

[0098] A sample can be any material containing tissues, cells, nucleic acids, genes, gene fragments, expression products, proteins, polypeptides, exosomes, gene expression products, or gene expression product fragments of a subject to be tested. A sample can include but is not limited to, tissue, cells, plasma, serum, or any other biological material from cells or derived from cells of an individual. The sample can be a heterogeneous or homogeneous population of cells or tissues. The sample can be a fluid that is acellular or depleted of cells (e.g., plasma or serum). In some cases, the sample is from a single patient. In some cases, the method comprises analyzing multiple samples at once, e.g., via massively parallel multiplex expression analysis on protein arrays or the like.

[0099] The sample can be a bodily fluid. The bodily fluid can be saliva, urine, blood, and/or amniotic fluid. The sample can be a fraction of any of these fluids, such as plasma, serum or exosomes (exemplary exosome isolation techniques can be found, e.g. in Li et al. Theranostics. 7(2017): 789-804). In some embodiments, the sample is a blood sample, plasma sample, or serum sample.

[0100] The sample may be obtained using any method that can provide a sample suitable for the analytical methods described herein. The sample may be obtained by a non-invasive method such as a throat swab, buccal swab, bronchial lavage, urine collection, scraping of the cervix, cervicovaginal sample secretion collection (e.g. with an ophthalmic sponge such as a Weck-Cel sponge), saliva collection, or feces collection. The sample may be obtained by a minimally-invasive method such as a blood draw. The sample may be obtained by venipuncture.

[0101] As used herein “obtaining a sample” generally includes obtaining a sample directly or indirectly. In some embodiments, the sample is taken from the subject by the same party (e.g. a testing laboratory) that subsequently acquires biomarker data from the sample. In some embodiments, the sample is received (e.g. by a testing laboratory) from another entity that collected it from the subject (e.g. a physician, nurse, phlebotomist, or medical caregiver). In some embodiments, the sample is taken from the subject by a medical professional under direction of a separate entity (e.g. a testing laboratory) and subsequently provided to said entity (e.g. the testing laboratory). In some embodiments, the sample is taken by the subject or the subject's caregiver at home and subsequently provided to the party that acquires biomarker data from the sample (e.g. a testing laboratory). A variety of kits suitable for self or home collection of biological samples have been described commercially and in the literature; see e.g., US20170023446A1 and U.S. Pat. No. 4,777,964A.

[0102] In some cases of the method, the non-wild type antigen can comprise a nucleic acid barcode sequence specific to said non-wild type antigen. Barcodes can include a unique oligonucleotide sequence that allows the corresponding peptides to which they are linked to be identified via a downstream technique, such as sequencing or hybridization. The nucleic acid barcode sequence can uniquely identify the non-wild type antigen. In some embodiments, the complex comprising the nucleic acid barcode sequence can be subjected to amplification under conditions sufficient to amplify said nucleic acid barcode. In some embodiments, the method can further comprise determining a nucleic acid barcode sequence linked to the amplified complex. In some cases, the method can further comprise using the nucleic acid barcode sequence of the amplified complex to generate said antibody repertoire; for example, the nucleic acid barcode sequences detected, when unique to the non-wild-type antigens to which they are attached, can provide a readout of the protein specificities of the antibodies detected.

[0103] In some cases, the protein library can further comprise a wild type epitope of an antibody in addition to a non-wild type epitope. Such libraries can be useful, for example, to read out whether an antibody detected to bind to a non-wild type antigen has specificity for the non-wild type antigen over its corresponding wild-type antigen.

[0104] The non-wild-type antigens can encompass a variety of variants of proteins produced by eukaryotic (e.g. human) organisms. In some cases, the non-wild type antigens are selected from peptide variants of wild-type proteins selected from the group consisting of somatic single amino acid substitution variants, insertion-deletion variants, structural variants such as gene fusions or splice junctions, or frameshifted protein sequences induced downstream of a missense mutation.

[0105] In some cases, the subject from which the sample to be interrogated can be treated with a therapeutic prior to collection of the sample. Therapeutics include standard cancer therapeutics, including alkylating agents (e.g. altretamine, bendamustine, busulfan, carboplatin, carmustine, chlorambucil, cisplatin, cyclophosphamide, dacarbazine, ifosfamide, lomustine, mechlorethamine, melphalan, oxaliplatin, temozolomide, thiotepa, trabectedin), nitrosoureas (e.g. carmustine, lomustine, streptozocin), antimetabolites (e.g. azacitidine, 5-fluorouracil (5-FU), 6-mercaptopurine (6-MP), capecitabine (xeloda), cladribine, clofarabine, cytarabine (ARA-C), decitabine, floxuridine, fludarabine, gemcitabine (gemzar), hydroxyurea, methotrexate, nelarabine, pemetrexed (alimta), pentostatin, pralatrexate, thioguanine, trifluridine/tipiracil), anthracyclines (e.g., daunorubicin, doxorubicin/adriamycin, doxorubicin liposomes, epirubicin, idarubicin, valrubicin), anti-tumor antibiotics (e.g., bleomycin, dactinomycin, mitomycin-c, mitoxantrone), topoisomerase inhibitors (e.g. irinotecan, topotecan, etoposide, mitoxantrone, teniposide), mitotic inhibitors (e.g., cabazitaxel, docetaxel, nab-paclitaxel, paclitaxel, vinblastine, vincristine, vinorelbine), corticosteroids (e.g., methylprednisone, prednisone, dexamethasone), all-trans-retinoic acid, arsenic trioxide, asparaginase, eribulin, hydroxyurea, ixabepilone, mitotane, omacetaxine, pegaspargase, procarbazine, romidepsin, and vorinostat. Therapeutics also include immunotherapeutics and immune checkpoint inhibitors described herein, such as PD-1 inhibitors, PD-L1 inhibitors, and CTLA-4 inhibitors.

[0106] In some cases the subject from which the sample has collected has received a treatment, including but not limited to a Tumor-Associated Antigen (TAA)-targeted therapy, a Neoantigen-targeted therapy, a SEREX antigen-targeted therapy, or a biologic or small molecule therapy targeted against CD19, HER2, STAT3, IDO, NY-ESO-1, CD40, CSF1R, BCMA, MUC1, ADORA2A, CD20, GD2, TLR7, WT1, IFNAR1, CD47, EGFR, LAG-3, OX40, PSMA, Mesothelin, TERT, TLR, TLR9, 4-1BB, IL2R, TLR4, CD33, GITR, HPV E6, Survivin, CD123, TIGIT, TIM-3, CD73, HPV E7, TLR3, CD38, EBV, STING, CD22, GPC3, HDAC1, CXCR4, GMCSFR, CD30, CEACAM5, HDAC6, HPV, CD3, MAGE-A3, TNF, PSA, CD25, CEA, EPCAM, CMV, IL12, PRAME, IL12R, 5T4, Beta Catenin, CCR2, PMEL, CXCL12, IGF1, CD46, CXCR1, GMCSF, IL15R, ROR1, TGFBR2, CCR4, FLT-3, FOLR1, GCSFR, ICOS, JAK2, KRAS, VISTA, CD133, CD27, CD39, CEACAM6, NKG2D, STAT5, TGFB1, TLR2, USP7, ANG1, ANG2, B7-H3, CLEC12A, IL13RA2, RIG-1, TRP2, VEGF, AFP, Alpha-Gal, COX-2, EPHA2, gp96, MUC16, p53, TGF-β, CD138, CDw136, CS1, CXCR2, EGFRvIII, E3 Ligase, Ubiquitin Ligase, Gelactin-3, Globo H, GR, IFNAR2, IFNGR1, IL6, JAK1, MLANA, RAS, SLAMF7, TDO, TGFB2, TLR8, ALK, Arginase, CCR1, CD56, CD70, FAP, GD3, IDH1, IL6R, IRAK4, MAGE-A4, MERTK, MIF, PSCA, PTGER4, SIRPA, TGFB, TGFBR1, ACPP, ADORA2B, AR, Brachyury, CA19-9, CD32, CEACAM1, Gastrin, HDAC, HPV L2, IFNAR, IFNGR, IGF1R, IGF2, IL15, IL17R, IL1B, IL7R, JAK, MAGE-A, MAGE-A1, MAGE-A6, P38, RORC, TLR5, VEGFR2, ADORA3, ATRT, B7-H4, c-KIT, CCR7, CD11b, CD135, CD171, CD174, CDH3, CX3CR1, Gelactin-1, GM3, HLA-A2, HSP70, IL10, IL17, IL2RB, JAK3, MDA5, NKG2A, PBF, PVRIG, SPAM1, URLC10, VEGFR1, ABCB5, ADABP, ADAM17, ADP, AEG1, Alpha-lactalbumin, AMHR2, Angiogenesis, ASPH, AXL, BCL2, BTE6-LX-8b, BTE6-X-15-7, Carbohydrate Antigen, CCL20, CCL3, CCNB1, CD147, CD155, CD16, CD162, CD16a, CD200, CD21, CD28, CD44, CD52, CD54, CD7, CD80, CD88, Claudin 18, cMET, COX2, CSF1, CTCFL, CXCR5, CXCR7, ElA, EIF2AK3, ERG, FGF2, FN1, GC, GM2, gpA33, HBV, Hemagglutinin, HER3, HILPDA, HLA-DR, HMW-MAA, HP59, HPV 16, HPV E6/7, HPV L1, HSP105, HSP65, HVEM, Hyaluronan, IL13RA1, IL2, IL21R, ILDR2, IL8, KIF20A, KIR2DL1, KIR2DL3, LXR, MAGE-A10, MAGE-C2, Mammaglobin A, MAPK, MICA, MiHA, MMP-11, MVP, Myeloblastin, N-Myc, NKp46, NLRP3, NR2F6, Oncofetal Antigen, P2RX7, RhoC, SIM-2, SSTR2, SSX2, STAT1, STn, TAG72, TAMA, TFDP3, TGFBR, TSA, TYK2, Tyrosinase, VEGFA, Ecto 5′ Nucleotidase, CD73, NTSE, ADAM9, Adenosine, AIM2, B7-H6, BAFF-R, BAI1, BARD1, BOB-1, CA9, Cancer Testis Antigen (CTA), CB2, CBLB, CCR9, CD13, CD130, CD150, CD160, CD200R1, CD267, CD29, CD3E, CD4, CD51, CD8, Claudin 6, CLEC2D, COX, COX-1, CPEB4, CPEG4, CRBN, CRLF2, CSPG4, CTA, CXCL1, CXCR3, Cytosine Deaminase, DCK, DKK1, DLL3, DR3, DR5, EBNA3C, EGF, EGFR5, ELVAL4, EPHA3, EPS8, EVI1, FAIM-3, FasR, FCU1, FLT3, FOLR, FOXM1, FSHR, Galectin-3, GalNAc, GARP, Gelactin-9, Gelatcin-1/3/9, GLD18, GNRHR, GP160, GP73, H3.3K27M, HAGE, HDAC2, HDAC8, HPV16 E6, HPV16 E7, HSP, Hypoxia Pathway, ICAM, ICAM7, IDO1, IFNG, IFNGR2, IGF2R, IGFBP2, IGK@, IL10RA, IL12RB1, IL13, IL13R, IL13Ralpha2, IL15RA, IL17A, IL17B, IL18, ILlA, IL1R1, IL1R3, IL21, IL22R, IL27R, IL2RA, IL35, IL9R, Integrin Beta-7, IRAK1, ITGB5, Kappa Myeloma Antigen, KIR2DL2, Kynurenine, LlCAM, Lambda Myeloma Antigen, LAMP, LLO, LXRA, LXRB, Mas Receptor, MG7, MHCI, MHCII, MIC, MOSPD2, MRP-3, MRP1, MRP3765, muGNTP01, MYB, MYBL2, NFAT, NGcGM3, Nrf2, p38 MAP Kinase, P55, PAM4, PAP, PASD1, PCDH18, PD-L2, PI3K-delta, POTE, PPT, Protein Tolemerase, PTGER2, RANKL, RBL001, RNF43, ROR2, S100A9, SLAMF1, STAT, TACSTD2, TASTD2, TDO2, TEM, Thymidine Kinase, Thymidylate Synthase, TIE2, TIMP3, TM4SF5, TOP1, TRBC1, TRBC2, TRIF, Tryptophan, TSHR, TWEAK, UTA2-1, VDBP, VRP, VSIG-4, XAGE1, XAGE1A, ZP1, or ZP3. In some cases, the treatment comprises a cell therapy, a cancer vaccine, a monoclonal antibody, an antibody-drug conjugate, a tumor infiltrating cell therapy, a chimeric antigen receptor cell therapy, a polyspecific antibody, an organoid, a targeted therapy, an immunotherapy, surgery, a radiotherapy, a chemotherapy, or a stem cell therapy.

[0107] In some aspects, the present disclosure provides for a method treating or monitoring a subject having or suspected of having a disease. Exemplary diseases include any of the cancers described herein. In some embodiments, the method comprises contacting a sample of a subject with a peptide display library comprising a plurality of non-wild type epitopes of antibodies under conditions sufficient to form a complex comprising an antibody from said sample bound to a non-wild type epitope of an antibody from said plurality of non-wild type epitopes of antibodies. The method may then comprise identifying the non-wild type epitope of the antibody.

[0108] After identifying the non-wild type epitope of the antibody, the method can comprise converting the non-wild-type epitope information to a readout. In some cases, the method can comprise using the non-wild type epitope of said antibody identified to generate an output indicative of a diagnosis of said disease. The disease can be any of the cancers described herein, and thus the method can include detecting the presence of a cancer not previously detected from a subject suspected of having a cancer. In some cases, the method can comprise using the non-wild type epitope of said antibody identified to predict a response of the subject to a therapeutic for the disease (e.g. cancer); thus the method can comprise using the epitope information derived to predict the response to any of the therapeutic agents described herein, including immune checkpoint inhibitors or immunotherapeutics. In some cases the method can comprise using the non-wild type epitope of said antibody identified to detect progression or regression of the disease in response to said subject having received said therapeutic. In some cases the method can comprise using the non-wild type epitope of said antibody identified to detect autoimmune toxicity or an immune related adverse event in response to said subject having received said therapeutic. In some cases, production of these readouts comprises comparing said non-wild type epitope of said antibody identified against an antibody repertoire of an immune response associated with cancer initiation, adverse cancer therapy response, or cancer progression or regression to generate said output or outputs. In some cases, the disease is specifically a non-viral disease (including but not limited to a non-viral cancer).

[0109] In some cases diseases referred to herein include cancers. In some cases the cancer is selected from the group consisting of anaplastic and medullary thyroid cancers, appendiceal cancer, arrhenoblastoma, biliary tract carcinoma, B-cell lymphoma, bladder cancer, breast cancer, cancers of the bile duct, carcinoid tumor, cervical cancer, cholangiocarcinoma, colon cancer, colorectal cancer, craniopharyngioma, endometrial cancer, epithelial intraperitoneal malignancy with malignant ascites, esophageal cancer, Ewing sarcoma, fallopian tube cancer, follicular cancer, gall bladder cancer, gastric cancer, gastrointestinal stromal tumor (GIST), GE-junction cancer, genito-urinary tract cancer, glioma, glioblastoma, head and neck cancer, head and neck squamous cell carcinoma, hepatoblastoma, hepatocarcinoma, hepatocellular carcinoma, Hodgkin lymphoma, non-Hogdkin lymphoma, HR+ and HER2+ breast cancer, Hurthle cell cancer, Inflammatory breast cancer, Kaposi sarcoma, kidney cancer, laryngeal cancer, liposarcoma, liver cancer, lung cancer, medulloblastoma, melanoma, Merkel cell carcinoma, microsatellite instability high or DNA mismatch repair deficient solid tumors, neuroblastoma, neuroblastoma, neuroendocrine cancer, non-small cell lung cancer, osteosarcoma (bone cancer), ovarian cancer, ovarian cancer with malignant ascites, pancreatic cancer, pancreatic neuroendocrine tumor, papillary cancer, parathyroid cancer, peritoneal carcinomatosis, peritoneal mesothelioma, primitive neuroectodermal tumor, prostate cancer, renal cell carcinoma, retinoblastoma, rhabdomyosarcoma, salivary gland carcinoma, sarcoma, skin cancer, small cell lung cancer, non-small cell lung cancer, mall intestine cancer, stomach cancer, testicular cancer, thyroid cancer, triple negative breast cancer, urothelial cancer, uterine cancer, uterine serous carcinoma, vaginal cancer, vulvar cancer, and Wilms tumor. In some cases the cancer can be selected from the group consisting of melanoma, B-cell lymphoma, non-small cell lung cancer, bladder cancer, head and neck squamous cell carcinoma, hepatocellular carcinoma, Hodgkin lymphoma, Merkel cell carcinoma, and microsatellite instability high or DNA mismatch repair deficient solid tumors.

### III. Design of Display Libraries

[0110] In some cases, design of peptide display libraries used herein can involve a particular bioinformatic workflow to select appropriate non-wild-type antigens for inclusion in the library, and/or to design peptides of appropriate lengths to present such antigens within the library. FIG. 1 illustrates how different classes of de novo somatic mutations in human disease can be filtered into a panel of immunoassay screening library probes. The source material for this panel includes diverse classes of somatic aberrations in the human genome, including but not limited to missense single nucleotide substitutions, nonsense truncations, insertions, deletions, gene fusions, and alternative splicing junctions, are curated and catalogued from data sources, including large sequencing project databases, and data from the sequencing results of clinical patient samples. From this source material, exonic mutations that have protein coding potential and which induce a change in sequence relative to the wild type (i.e. non-silent mutations) can be retained, while intergenic, silent or intronic mutations of no protein sequence consequence can be excluded from further analysis. Mutations can be ranked according to their frequency in said database or at a population level, such that more highly frequent mutations, which produced shared or “public” putative antigens in multiple patients, may be prioritized for inclusion in an eventual panel of immunoassay screening library probes. Alternatively, mutations which appear to be “private,” and are observed in a single individual's genomic data, can also be prioritized for inclusion if the patient represents a clinical case or genomic makeup of particular interest, or if the mutation is of exceptional functional consequence.

[0111] Further criteria can then be applied to prioritize or deprioritize particular somatic mutations of interest, including but not limited to the predicted level of immunogenicity of the protein or peptide fragment produced by a given mutation (for instance, as predicted by binding predictors for B cell receptor, T cell receptor, major histocompatibility complex (MIC) class I, MHC class II, further immune receptor ligand binding algorithms), the predicted functional deleteriousness of the somatic mutation in question, the subcellular localization of the relevant wild type or mutant protein subject to the mutation of interest (including determining extracellular versus intracellular localization, to select proteins based on exoproteome or intraproteome membership), or the overall composition of the set of selected mutations relative to a relevant proportion or benchmark.

### A) Identification of Simple Somatic Mutations for Inclusion in a Library

[0112] Given a set of prioritized somatic mutation classes, and with cancer as an example disease indication and immunoassay research application, different implementations of “simple somatic mutations” (FIG. 2), including missense, nonsense, indels, and other non-structural classes, can be computationally curated and catalogued from databases of patient tumor-normal sequencing results, such as the International Cancer Genomic Consortium (ICGC). The ICGC Data Release 28, for instance, makes publicly available summary data from 86 cancer sequencing projects, covering 22,330 patients with U.S. Pat. No. 81,782,602 “simple somatic mutation” tumoral genotype calls across 22 types of cancer. Somatic mutations cover classes of variants including but not limited to variant types depicted in FIG. 1, including missense and nonsense mutations to protein coding regions. Among the 81,782,602 unique mutations, 954,200 are selected that have been observed in greater than one person, while additional “private” mutations from select cancer patients of interest (based on clinically relevant treatment regimens and tumor exome sequencing results) are included, adding additional somatic mutations for further design consideration and analysis.

### B) Structural Variants

[0113] Structural genetic variation, which may be defined as deletions, duplications, copy-number variants, insertions, inversions or translocations of greater than or equal to 50 base pair sequences, can be further leveraged to represent protein sequence consequence of structural somatic variation for consideration and inclusion as immunoassay screening library members. Using structural variation in the cancer proteome as a particular example, somatic variation of different classes (including but not limited to gene fusions and alternative splicing events associated with cancer) are processed to compute protein sequence consequence.

[0114] Gene fusion identifiers (which include gene identity of (a) upstream and (b) downstream fusion gene partners, and the chromosomal base pair location of the respective (c) upstream and (d) downstream fusion junctions) can be downloaded, called, and curated from data sources (FIG. 3) including the TumorFusions database, the ChimerDB database, the Pan-Cancer Analysis of Whole Genomes (PCAWG) dataset, and the FusionGDB database (which collectively comprise over 147,226 distinct combinations of fusion gene partners and junction indices from over ten thousand cancer genomes), as well as the COSMIC database, and the Mitelman Database of Chromosome Aberrations and Gene Fusions.

[0115] Cancer genome alternative splicing events can be downloaded from the National Cancer Institute Genomic Data Commons and from publicly accessible data associated with relevant publications in the field (Kahles et al., Cancer Cell 2018; Jayasinghe et al., Cell Reports 2018). Alternative splicing alteration identifiers (which similarly include the alternatively spliced gene identifier, as well as the chromosomal base pair locations of the 5-prime and 3-prime splice junctions) can be downloaded, called, and curated from these data sources (FIG. 4).

[0116] Data can be merged and harmonized, to eliminate duplicates and redundancies attributed to similar observations or overlapping primary data sources among the databases, which include The Cancer Genome Atlas (TCGA), the Genotype-Tissue Expression project (GTEx), the Database of Translocation Breakpoints in Cancer (TICdb), the GenBank database, the Online Mendelian Inheritance in Man (OMIM) ontology, the ChiTaRS database, and the NCBI Sequence Read Archive (SRA), among others.

### C) Frameshifted Peptides

[0117] Somatic indel mutations and structural variants can induce frameshifts, and recent studies have shown that de novo protein sequences produced by frameshifts can be highly immunogenic biomarkers of immunotherapy efficacy and putative neoantigens that may drive T cell anti-tumor responses. In order to capture frameshift peptides induced downstream of non-wild type protein somatic mutation events, out-of-frame protein products are identified based on (a) insertions or deletions of length modulo 3 equal to 1 or 2 (i.e. indel length is not a multiple of 3), (b) proteins where the 3-prime wild type protein sequence fails to align to the mutated protein product, or (c) where the fusion gene or alternative splicing outcome is identified as “out-of-frame” by the prediction modeling algorithm (e.g. AGFusion). In these cases, peptide fragments are captured for inclusion on the immunoassay screening library by tiling the frameshifted region with overlapping windows of a particular width (i.e. 50 amino acids wide, tiled with start positions beginning every 25 amino acids to achieve 2× coverage of any given position) that capture de novo frameshifted protein sequences, as in FIG. 3 and FIG. 7. In the event that the stop codon does not coincide with the end of the window, protein sequence may be backfilled to achieve a particular window width (e.g. 50 amino acids).

### D) Design of Display Oligonucleotides/Peptides for Non-Wild Type Antigens

[0118] In addition to full length protein computed as a byproduct of said bioinformatic and algorithmic processes, a peptide fragment of a particular size can be defined in each case, according to a window of a particular width (e.g. 50 amino acids long) surrounding the juncture of a particular mutation or amino acid change, or downstream frameshifted protein sequence. For 5-prime or N-terminus proximal amino acid substitutions (occurring within less than or equal to half of the window size, e.g. 25 amino acids, relative to the transcription start site (TSS)), this window may be backfilled with downstream sequence to reach the specific sequence length or window width. Conversely, for 3-prime or C-terminus proximal amino acid substitutions (occurring within less than or equal to half of the window size, e.g. 25 amino acids, of a stop codon), the window may also be backfilled with upstream sequence to reach the specific sequence length or window width. For protein products smaller than the specific window width, due to potentially naturally smaller protein size or as a byproduct of a premature truncation mutation event, the peptide fragment may be backfilled with a linker protein, including but not limited to a sequence of hydrophilic and flexible amino acids (e.g. Glycine or Alanine), or alternative published or unpublished protein linker sequences.

[0119] Additional sequences, comprised of protein or peptide sequences of (a) known wild type epitopes of monoclonal antibodies, or (b) randomized amino acid sequences, are also included in the library as experimental positive and negative controls for the immunoassay (FIG. 8).

[0120] The particular amino acid sequence is reverse translated into a nucleic acid sequence optimized for codon usage of a particular expression vector (e.g. E. coli and T7 bacteriophage), and several rounds of codon optimization are implemented to remove restriction sites while maintaining the protein coding sequence. In the event of a conflict whereby the 5-prime and 3-prime protein sequences of a particular wild type and non-wild type library member are exactly identical, a further codon optimization criterion is invoked to ensure that differential codon usage may uniquely encode the nucleic acid sequences of both library members, preserving their identity at a protein-level while uniquely distinguishing their sequences at the nucleic acid level.

[0121] Flanking sequences are added to introduce improved properties for protein-level isolation of full-length and in-frame products, such as affinity tags (e.g. Streptavidin tag, FLAG tag, or Histidine Tag), to provide restriction sites (e.g. EcoRI, HindIII) useful for cloning into said expression vector (e.g. T7 Select 10-3b peptide display), or to encode metadata associated with the sequence. The nucleic acid sequence designs are synthesized by oligo library synthesis (OLS).

IV. Computer systems

[0122] The present disclosure provides computer systems that are programmed to implement methods of the disclosure. FIG. 21 shows a computer system 401 that is programmed or otherwise configured to generate or develop antibody profile or compare antibodies with the profile of the specific immune response. The computer system 401 can regulate various aspects of the present disclosure, such as, for example, receive or generate sequence reads, correlate sequences to specific epitopes or antibodies, output a result for the user as to the presence of an antibody or profile, or an expected progression of a disease. The computer system 401 can be an electronic device of a user or a computer system that is remotely located with respect to the electronic device. The electronic device can be a mobile electronic device.

[0123] The computer system 401 includes a central processing unit (CPU, also “processor” and “computer processor” herein) 405, which can be a single core or multi core processor, or a plurality of processors for parallel processing. The computer system 401 also includes memory or memory location 410 (e.g., random-access memory, read-only memory, flash memory), electronic storage unit 415 (e.g., hard disk), communication interface 420 (e.g., network adapter) for communicating with one or more other systems, and peripheral devices 425, such as cache, other memory, data storage and/or electronic display adapters. The memory 410, storage unit 415, interface 420 and peripheral devices 425 are in communication with the CPU 405 through a communication bus (solid lines), such as a motherboard. The storage unit 415 can be a data storage unit (or data repository) for storing data. The computer system 401 can be operatively coupled to a computer network (“network”) 430 with the aid of the communication interface 420. The network 430 can be the Internet, an internet and/or extranet, or an intranet and/or extranet that is in communication with the Internet. The network 430 in some cases is a telecommunication and/or data network. The network 430 can include one or more computer servers, which can enable distributed computing, such as cloud computing. The network 430, in some cases with the aid of the computer system 401, can implement a peer-to-peer network, which may enable devices coupled to the computer system 401 to behave as a client or a server.

[0124] The CPU 405 can execute a sequence of machine-readable instructions, which can be embodied in a program or software. The instructions may be stored in a memory location, such as the memory 410. The instructions can be directed to the CPU 405, which can subsequently program or otherwise configure the CPU 405 to implement methods of the present disclosure. Examples of operations performed by the CPU 405 can include fetch, decode, execute, and writeback.

[0125] The CPU 405 can be part of a circuit, such as an integrated circuit. One or more other components of the system 401 can be included in the circuit. In some cases, the circuit is an application specific integrated circuit (ASIC).

[0126] The storage unit 415 can store files, such as drivers, libraries and saved programs. The storage unit 415 can store user data, e.g., user preferences and user programs. The computer system 401 in some cases can include one or more additional data storage units that are external to the computer system 401, such as located on a remote server that is in communication with the computer system 401 through an intranet or the Internet.

[0127] The computer system 401 can communicate with one or more remote computer systems through the network 430. For instance, the computer system 401 can communicate with a remote computer system of a user. Examples of remote computer systems include personal computers (e.g., portable PC), slate or tablet PC's (e.g., Apple® iPad, Samsung® Galaxy Tab), telephones, Smart phones (e.g., Apple® iPhone, Android-enabled device, Blackberry®), or personal digital assistants. The user can access the computer system 401 via the network 430.

[0128] Methods as described herein can be implemented by way of machine (e.g., computer processor) executable code stored on an electronic storage location of the computer system 401, such as, for example, on the memory 410 or electronic storage unit 415. The machine executable or machine-readable code can be provided in the form of software. During use, the code can be executed by the processor 405. In some cases, the code can be retrieved from the storage unit 415 and stored on the memory 410 for ready access by the processor 405. In some situations, the electronic storage unit 415 can be precluded, and machine-executable instructions are stored on memory 410.

[0129] The code can be pre-compiled and configured for use with a machine having a processer adapted to execute the code or can be compiled during runtime. The code can be supplied in a programming language that can be selected to enable the code to execute in a pre-compiled or as-compiled fashion.

[0130] Aspects of the systems and methods provided herein, such as the computer system 401, can be embodied in programming. Various aspects of the technology may be thought of as “products” or “articles of manufacture” generally in the form of machine (or processor) executable code and/or associated data that is carried on or embodied in a type of machine readable medium. Machine-executable code can be stored on an electronic storage unit, such as memory (e.g., read-only memory, random-access memory, flash memory) or a hard disk. “Storage” type media can include any or all of the tangible memory of the computers, processors or the like, or associated modules thereof, such as various semiconductor memories, tape drives, disk drives and the like, which may provide non-transitory storage at any time for the software programming. All or portions of the software may at times be communicated through the Internet or various other telecommunication networks. Such communications, for example, may enable loading of the software from one computer or processor into another, for example, from a management server or host computer into the computer platform of an application server. Thus, another type of media that may bear the software elements includes optical, electrical and electromagnetic waves, such as used across physical interfaces between local devices, through wired and optical landline networks and over various air-links. The physical elements that carry such waves, such as wired or wireless links, optical links or the like, also may be considered as media bearing the software. As used herein, unless restricted to non-transitory, tangible “storage” media, terms such as computer or machine “readable medium” refer to any medium that participates in providing instructions to a processor for execution.

[0131] Hence, a machine readable medium, such as computer-executable code, may take many forms, including but not limited to, a tangible storage medium, a carrier wave medium or physical transmission medium. Non-volatile storage media include, for example, optical or magnetic disks, such as any of the storage devices in any computer(s) or the like, such as may be used to implement the databases, etc. shown in the drawings. Volatile storage media include dynamic memory, such as main memory of such a computer platform. Tangible transmission media include coaxial cables; copper wire and fiber optics, including the wires that comprise a bus within a computer system. Carrier-wave transmission media may take the form of electric or electromagnetic signals, or acoustic or light waves such as those generated during radio frequency (RF) and infrared (IR) data communications. Common forms of computer-readable media therefore include for example: a floppy disk, a flexible disk, hard disk, magnetic tape, any other magnetic medium, a CD-ROM, DVD or DVD-ROM, any other optical medium, punch cards paper tape, any other physical storage medium with patterns of holes, a RAM, a ROM, a PROM and EPROM, a FLASH-EPROM, any other memory chip or cartridge, a carrier wave transporting data or instructions, cables or links transporting such a carrier wave, or any other medium from which a computer may read programming code and/or data. Many of these forms of computer readable media may be involved in carrying one or more sequences of one or more instructions to a processor for execution.

[0132] The computer system 401 can include or be in communication with an electronic display 435 that comprises a user interface (UI) 440 for providing, for example, selecting antibodies for analysis, interacting with graphs correlating antibodies to specific generated profiles. Examples of UI's include, without limitation, a graphical user interface (GUI) and web-based user interface.

[0133] Methods and systems of the present disclosure can be implemented by way of one or more algorithms. An algorithm can be implemented by way of software upon execution by the central processing unit 405. The algorithm can, for example, calculate statistics measurements to identify antibodies and generate profiles or predict efficacy and toxicity of a treatment.

### Examples

### Example 1: Design Principles for Non-Wild Type Antigenic Targets for Antigen Library

[0134] An antigen array comprising a plurality of non-wild type human antigens was designed.

[0135] FIG. 1 illustrates how different classes of de novo somatic mutations in human disease can be filtered into a panel of immunoassay screening library probes. The source material for this panel includes diverse classes of somatic aberrations in the human genome, including but not limited to missense single nucleotide substitutions, nonsense truncations, insertions, deletions, gene fusions, and alternative splicing junctions, are curated and catalogued from data sources, including large sequencing project databases, and data from the sequencing results of clinical patient samples. From this source material, exonic mutations that have protein coding potential and which induce a change in sequence relative to the wild type (i.e. non-silent mutations) can be retained, while intergenic, silent or intronic mutations of no protein sequence consequence can be excluded from further analysis. Mutations can be ranked according to their frequency in said database or at a population level, such that more highly frequent mutations, which produced shared or “public” putative antigens in multiple patients, may be prioritized for inclusion in an eventual panel of immunoassay screening library probes. Alternatively, mutations which appear to be “private,” and are observed in a single individual's genomic data, can also be prioritized for inclusion if the patient represents a clinical case or genomic makeup of particular interest, or if the mutation is of exceptional functional consequence.

[0136] Further criteria can then be applied to prioritize or deprioritize particular somatic mutations of interest, including but not limited to the predicted level of immunogenicity of the protein or peptide fragment produced by a given mutation (for instance, as predicted by binding predictors for B cell receptor, T cell receptor, major histocompatibility complex (MHC) class I, MHC class II, further immune receptor ligand binding algorithms), the predicted functional deleteriousness of the somatic mutation in question, the subcellular localization of the relevant wild type or mutant protein subject to the mutation of interest (including determining extracellular versus intracellular localization, to select proteins based on exoproteome or intraproteome membership), or the overall composition of the set of selected mutations relative to a relevant proportion or benchmark.

### Simple Somatic Mutations

[0137] Given a set of prioritized somatic mutation classes, and with cancer as an example disease indication and immunoassay research application, different implementations of “simple somatic mutations” (FIG. 2), including missense, nonsense, indels, and other non-structural classes, can be computationally curated and catalogued from databases of patient tumor-normal sequencing results, such as the International Cancer Genomic Consortium (ICGC). The ICGC Data Release 28, for instance, makes publicly available summary data from 86 cancer sequencing projects, covering 22,330 patients with U.S. Pat. No. 81,782,602 “simple somatic mutation” tumoral genotype calls across 22 types of cancer. Somatic mutations cover classes of variants including but not limited to variant types depicted in FIG. 1, including missense and nonsense mutations to protein coding regions. Among the 81,782,602 unique mutations, 954,200 are selected that have been observed in greater than one person, while additional “private” mutations from select cancer patients of interest (based on clinically relevant treatment regimens and tumor exome sequencing results) are included, adding additional somatic mutations for further design consideration and analysis.

### Structural Variants

[0138] Structural genetic variation, which may be defined as deletions, duplications, copy-number variants, insertions, inversions or translocations of greater than or equal to 50 base pair sequences, can be further leveraged to represent protein sequence consequence of structural somatic variation for consideration and inclusion as immunoassay screening library members. Using structural variation in the cancer proteome as a particular example, somatic variation of different classes (including but not limited to gene fusions and alternative splicing events associated with cancer) are processed to compute protein sequence consequence.

[0139] Gene fusion identifiers (which include gene identity of (a) upstream and (b) downstream fusion gene partners, and the chromosomal base pair location of the respective (c) upstream and (d) downstream fusion junctions) can be downloaded, called, and curated from data sources (FIG. 3) including the TumorFusions database, the ChimerDB database, the Pan-Cancer Analysis of Whole Genomes (PCAWG) dataset, and the FusionGDB database (which collectively comprise over 147,226 distinct combinations of fusion gene partners and junction indices from over ten thousand cancer genomes), as well as the COSMIC database, and the Mitelman Database of Chromosome Aberrations and Gene Fusions.

[0140] Cancer genome alternative splicing events can be downloaded from the National Cancer Institute Genomic Data Commons and from publicly accessible data associated with relevant publications in the field (Kahles et al., Cancer Cell 2018; Jayasinghe et al., Cell Reports 2018). Alternative splicing alteration identifiers (which similarly include the alternatively spliced gene identifier, as well as the chromosomal base pair locations of the 5-prime and 3-prime splice junctions) can be downloaded, called, and curated from these data sources (FIG. 4).

[0141] Data can be merged and harmonized, to eliminate duplicates and redundancies attributed to similar observations or overlapping primary data sources among the databases, which include The Cancer Genome Atlas (TCGA), the Genotype-Tissue Expression project (GTEx), the Database of Translocation Breakpoints in Cancer (TICdb), the GenBank database, the Online Mendelian Inheritance in Man (OMIM) ontology, the ChiTaRS database, and the NCBI Sequence Read Archive (SRA), among others.

### Example 2: Implementation of a Non-Wild Type Antigen Immunoassay Library Design

### Simple Somatic Mutations

[0142] Using the particular set of somatic mutations, next the protein sequence consequence of selected simple somatic mutations can be computed bioinformatically to identify the operative non-wild type protein-level changes induced by the somatic mutation of interest (FIG. 2). For every somatic coding mutation under consideration, the corresponding gene and protein sequence identifiers (e.g. from ENSEIBL or NCBI) are identified. Wild type nucleic acid coding sequences, and their corresponding protein sequence, can be stored and referenced in a relational database or associative array data structure. Information stored in descriptive mutational identifiers (e.g. in HGVS format), including the base pair or amino acid location of a change, are applied to the reference nucleic acid and protein sequences to produce the functional consequence specified in the identifier—for example, the substitution (Table 1), insertion, or deletion (Table 2) of a particular base pair or base pairs, leading to the substitution, insertion, or deletion of a particular amino acid or acids. This includes cases where novel coding sequence is generated through shifts in reading frame introduced by start-losses (Table 3), insertions, deletions, duplications, or other biological processes. The preceding stages are executed by integrating custom bioinformatics software alongside existing, published tools for variant calling and annotation (e.g. Annovar, SnpEff, VEP) to convert nucleic-acid and protein-level variant annotation descriptions to resultant protein sequence consequence alteration sequences.

### Structural Variants

[0143] Due to the larger scale nature of structural variants (which may be defined as sequence aberrations of greater than or equal to 50 base pairs), additional custom informatics solutions can be constructed to compute protein sequence consequences with the additional complexity of large-scale substitution or deletion events.

[0144] Gene fusion events (Table 4), for instance, can be computed using custom bioinformatics software alongside existing, published tools for gene fusion modeling (e.g. AGFusion open source software package). In particular, the AGFusion algorithm (e.g. via Python command line package usage “agfusion annotate”) requires 5 inputs: (1) “—gene5prime,” the HGNC gene name of a 5-prime fusion partner gene (e.g. TMPRSS2), (2) “—junction5prime,” the 5-prime fusion junction “breakpoint,” a chromosomal base pair position, at which the fusion event has been documented, (3) “—gene3prime,” the HGNC gene name of a 3-prime fusion partner gene (e.g. ERG), (4) “—junction3prime,” the 3-prime fusion junction breakpoint, and finally (5) “—db,” the reference genome and build (e.g. “agfusion.homo_sapiens.75.db,” Human hg19/GRCh37 Ensembl build 75). Using the command line tools, the “—noncanonical” flag is invoked to explore all possible permutations of isoform sequence combinations that may arise from the recombination of two fusion genes (e.g. FIG. 5).

[0145] Alternative splicing variants (Table 5) may similarly be modeled as a gene fusion between a gene and itself—hence, it follows that the preceding and following stages similarly apply to the computation and analytic library design of non-wild type protein sequences for both gene fusion junctions and alternatively spliced junction proteins and peptides, where the “—gene5prime” and “-gene3prime” flags both refer to the same input gene for alternative splicing (e.g. FIG. 6).

[0146] In addition to modeling full-length fusion proteins with said workflow, a protein peptide fragment of a particular size may be defined in a window of a particular width (e.g. 50 amino acids long) surrounding the fusion or splice junctions. In doing so, wild type sequences are pulled from reference databases (e.g. Ensembl hg19 FASTA format reference proteome), and command line tools (e.g. BISQUE, UCSC MySQL database, MyGene Python API) are used to map from transcripts (e.g. Ensembl ENSG* and ENST* identifiers, respectively) to protein sequences fusion pair identifiers (e.g. Ensembl ENSP*). Next, an efficient suffix tree algorithm is used to align the wild type gene sequence(s) to the chimeric fusion gene or splice gene sequence, by identifying the “longest common substring” (LCS). By identifying the amino acid position at which the “—gene5prime” LCS no longer matches the fusion/splice gene, at which point it transitions to a secondary LCS deriving from the “—gene3prime” sequence, the precise junction of the structural somatic variant is identified and defined for potential inclusion in the immunoassay screening library.

### Frameshifted Peptides

[0147] Somatic indel mutations and structural variants can induce frameshifts, and recent studies have shown that de novo protein sequences produced by frameshifts can be highly immunogenic biomarkers of immunotherapy efficacy and putative neoantigens that may drive T cell anti-tumor responses. In order to capture frameshift peptides induced downstream of non-wild type protein somatic mutation events, out-of-frame protein products are identified based on (a) insertions or deletions of length modulo 3 equal to 1 or 2 (i.e. indel length is not a multiple of 3), (b) proteins where the 3-prime wild type protein sequence fails to align to the mutated protein product, or (c) where the fusion gene or alternative splicing outcome is identified as “out-of-frame” by the prediction modeling algorithm (e.g. AGFusion). In these cases, peptide fragments are captured for inclusion on the immunoassay screening library by tiling the frameshifted region with overlapping windows of a particular width (i.e. 50 amino acids wide, tiled with start positions beginning every 25 amino acids to achieve 2× coverage of any given position) that capture de novo frameshifted protein sequences, as in FIG. 3 and FIG. 7. In the event that the stop codon does not coincide with the end of the window, protein sequence may be backfilled to achieve a particular window width (e.g. 50 amino acids).

### Oligonucleotide Design

[0148] In addition to full length protein computed as a byproduct of said bioinformatic and algorithmic processes, a protein peptide fragment of a particular size can be defined in each case, according to a window of a particular width (e.g. 50 amino acids long) surrounding the juncture of a particular mutation or amino acid change, or downstream frameshifted protein sequence. For 5-prime or N-terminus proximal amino acid substitutions (occurring within less than or equal to half of the window size, e.g. 25 amino acids, relative to the transcription start site (TSS)), this window may be backfilled with downstream sequence to reach the specific sequence length or window width. Conversely, for 3-prime or C-terminus proximal amino acid substitutions (occurring within less than or equal to half of the window size, e.g. 25 amino acids, of a stop codon), the window may also be backfilled with upstream sequence to reach the specific sequence length or window width. For protein products smaller than the specific window width, due to potentially naturally smaller protein size or as a byproduct of a premature truncation mutation event, the peptide fragment may be backfilled with a linker protein, including but not limited to a sequence of hydrophilic and flexible amino acids (e.g. Glycine or Alanine), or alternative published protein linker sequences.

[0149] Additional sequences, comprised of protein or peptide sequences of (a) known wild type epitopes of monoclonal antibodies, or (b) randomized amino acid sequences, are also included in the library as experimental positive and negative controls for the immunoassay (FIG. 8).

[0150] The particular amino acid sequence is reverse translated into a nucleic acid sequence optimized for codon usage of a particular expression vector (e.g. E. coli and T7 bacteriophage), and several rounds of codon optimization are implemented to remove restriction sites while maintaining the protein coding sequence. In the event of a conflict whereby the 5-prime and 3-prime protein sequences of a particular wild type and non-wild type library member are exactly identical, a further codon optimization criterion is invoked to ensure that differential codon usage may uniquely encode the nucleic acid sequences of both library members, preserving their identity at a protein-level while uniquely distinguishing their sequences at the nucleic acid level.

[0151] Flanking sequences are added to introduce improved properties for protein-level isolation of full-length and in-frame products, such as affinity tags (e.g. Streptavidin tag, FLAG tag, or Histidine Tag), to provide restriction sites (e.g. EcoRI, HindIII) useful for cloning into said expression vector (e.g. T7 Select 10-3b peptide display), or to encode metadata associated with the sequence. The nucleic acid sequence designs are synthesized by oligo library synthesis (OLS).

### Example 3: Peptide Display of a Non-Wild Type Antigen Immunoassay Library

[0152] Amplification, Cloning, and Packaging of a Non-Wild Type Oligonucleotide Library and Peptide Display Expression Vector System

[0153] The packaging of the immunoassay library design oligonucleotides (oligos) into a peptide display library expression vector is implemented in accordance with published protocols (see e.g., Novagen T7Select Cloning Kit, O'Donovan et al. Brain Communications, Volume 2, Issue 2, 2020, fcaa059; and Mohan et al. Nat Protoc. 2018 September; 13(9):1958-1978. doi: 10.1038/s41596-018-0025-6). Briefly, one amplicon library is created for every 20,000-30,000 oligos in the library design (e.g. 10 PCR reactions for a library design with diversity of 300,000). Each PCR reaction contains 5 μl of 50 pg/ul library, 12.5 μl PCR Master Mix, 1.25 μl 10 μM forward primer, 1.25 μl 10 μM reverse primer, and 5 μl nuclease-free water or comparable components, concentrations, and volumes. The library PCR conditions are as follows or similar to as follows: 98° C. for 3 minutes; 98° C. for 30 seconds, 68° C. for 30 seconds and 72° C. for 30 seconds repeated for 25 cycles; 72° C. for 3 minutes and a hold at 4° C. The PCR reaction is cleaned up using a standard PCR cleanup kit and the DNA concentration is measured using a Bioanalyzer, Qubit, qPCR, or similar DNA quantification instrument. Each PCR reaction is double digested using EcoRI and HindIII restriction enzymes for 15 minutes at 37° C. in CutSmart Buffer. Restriction digests may also be performed individually or with other enzymes. An agarose gel (1-4%) is run and the relevant band is excised. The bands are purified using a standard Gel DNA recovery kit and DNA is eluted. The DNA concentration is measured using a Bioanalyzer, Qubit, qPCR, or similar DNA quantification instrument and DNA is diluted to 6 ng/μl or another specific concentration. The digested library DNA is ligated into the expression vector arms using a molar ratio between 2:1 to 1:3 insert to vector and ligase master mix in a 10 μl reaction. A 2 μl volume of the ligation reaction is packaged into 10 μl of Packaging Extract, mixed by pipetting and incubated at room temperature for 1-2 hours. The reaction is quenched by adding chilled sterile LB media. A plaque assay is done for each packaging reaction and the packaging efficiencies are calculated.

[0154] For T7 bacteriophage (phage) packaging reactions, for instance, 0.1 ml of overnight BLT5403 culture is added to 10 ml of LB media and the bacterial culture is grown to an OD600 of 0.5-1.0. The phage plaque forming units (pfu) are divided by the specific multiplicity of infection (MOI), 1.0-0.0001, in order to calculate the number of host cells required for the amplification. The required amount of culture is calculated using standard methods. The required culture volume per packaging reaction is plated in a 96-deep well plate and the appropriate volume of phage is added at the specific MOI. Complete lysis occurs between 1-3 hours of incubation in a 37° C. shaker incubator. The amplified packaging reaction is next pooled into a single tube and the lysate is clarified by spinning at 12,000 xg for 10 minutes at 4° C. The supernatant is filtered through a 0.22 micron filter into a sterile bottle. Phage precipitation buffer (5× PEG-8000 20% w/v with 2.5 M NaCl) is added to the filtered phage lysate and mixed. The phage is precipitated overnight at 4° C. The next day the precipitated phage is spun at 12,000×g for 15 minutes at 4° C. and the supernatant is discarded. The pellet is resuspended in 10 ml of TBS-M (TBS with 6 mM MgCl2) and aliquoted into microcentrifuge tubes. Phage precipitation buffer is added to each tube of resuspended phage, gently vortexed and then incubated at 4° C. for 1 hour. The phage precipitate is then spun at 14,000 xg for 10 minutes and the supernatant is discarded. The pellet is resuspended in 1 ml of TBS-M and spun for 1 minutes at 14,000 xg to pellet any insoluble debris. The supernatant is transferred into a new tube and a plaque assay is performed. The amplified library lysate is stored at 4° C. for short-term storage. For long-term storage, 5% v/v DMSO is added and the phage library lysate is stored in liquid nitrogen. Other aliquots can be kept at −20° C. or −80° C.

### NGS Quality Control

[0155] Quality control of the peptide display library is conducted through NGS data analysis of the plurality of DNA constituents of a particular OLS pool and their representation in a packaged immunoassay library (FIG. 9). First, NGS of the OLS pool is conducted to confirm successful DNA synthesis of the immunoassay library design. Specifically, lyophilized DNA molecules are resuspended in water, and are PCR amplified using primers complementary to common flanking regions to produce an NGS library and optionally add NGS adapter sequences (e.g. i5 and i7). Likewise, a further NGS library is generated by PCR amplification of the packaged peptide display library, to represent the quality of the packaged peptide display library and the extent to which its contents represent the original library design, as well as for subsequent reamplifications of the packaged library (FIG. 10). Sequencing is conducted at a sufficient depth of coverage to confirm the presence of a large majority of the designed sequences.

[0156] Upon the receipt of raw FASTQ formatted data, sequencing reads are mapped to the original library design (e.g. using Bowtie, Bowtie 2, or similar algorithms), permitting perfect and imperfect matches (i.e. due to synthesis errors or PCR errors) based on mismatch sequence identity thresholds predefined by the user. Next, DNA genotype calls are generated using custom or published software to consider base calls, quality scores, and generate consensus calls based on multiple reads deriving from a single molecule (i.e. paired end reads for a single molecule). Consensus base calls are generated based on agreement or disagreement of calls at a given position, with favorable consideration to reads with higher quality scores at a given position.

[0157] Summary statistics and histograms of quality controlled NGS read counts are generated to evaluate the degree of representation in relation to the library design. Distributions of read counts for the OLS pool and the packaged peptide display library are fit to a normal, gaussian distribution to ensure a high degree of uniformity (e.g. 90% of sequences within 2 standard deviations of the mean) and representation (e.g. >99% with non-zero read counts) to indicate successful synthesis and packaging of the library constituents.

### Example 4: Clinical Study Design and Patient Cohort Description

### Study Rationale and Application to Immuno-Oncology

[0158] One application of immune repertoire profiling is characterizing the immune response to cancer immunotherapy treatment. Immuno-oncology is ushering in a new era of cancer treatment by stimulating the immune system to aggressively target and destroy cancer cells. Although immune checkpoint inhibitors (ICI) can be effective in treating many advanced stage or metastatic cancers, there are significant limitations to their use. As few as 1 in 9 patients respond to ICI treatment, and more than half of ICI patients experience toxic autoimmune side effects, sometimes life-threatening or fatal.

[0159] Research suggests that a better understanding of the immune response and immune repertoire in patients with exceptional efficacy and toxicity outcomes, versus those without, may unlock a new roadmap for therapeutically actionable targets, molecules, and biomarkers. Specifically, recent studies have now highlighted the influence of B cell responses in immuno-oncology, and shown that antibodies offer a valuable measure of both ICI efficacy and ICI toxicity, suggesting that B cell antibodies and immunoassays may offer a solution where the need exists for companion diagnostic and prognostic tests for ICI treatment. This emerging area of investigation presents the opportunity to develop a new generation of novel therapies and tools inspired by diverse B cell immune responses in cancer patients.

### Study Designs, Cohorts, and Protocols

[0160] The inventors have developed collaborations with oncologists at leading cancer centers and have sponsored a clinical trial with a major health system, culminating in a proprietary biobank of blood samples (including longitudinal serum and plasma) and associated clinical outcomes and demographics from adult patients with advanced or metastatic cancer receiving ICI treatment (Anti-PD-1, Anti-PD-L1, and/or Anti-CTLA-4). Patient ICI regimens included monotherapy with ICI agents, combination therapy with multiple ICI agents, combination therapy with ICI and chemotherapeutic agents, combination therapy with ICI and FDA-approved targeted therapies, and combination therapy with ICI and novel investigational agents as part of an experimental clinical trial. Patients who provided informed consent were not further restricted based age, sex, ethnicity, or tumor type, and may withdraw their participation at any point from the studies.

[0161] Biospecimens were collected according to institutionally defined IRB-approved protocols for clinical research. Biospecimen timepoints were collected when available at a series of pre-defined timepoints: (a) pre-treatment with ICI, or at the closest available timepoint to pre-treatment with ICI after confirmation of stable disease, (b) prior to subsequent dose/infusion of immune checkpoint inhibitors, after initial collection, (c) within 21 days of a suspected immune related adverse event diagnosis, (d) within 21 days of an increase in severity of immune related adverse event, as measured by clinical presentation or clinical labs, (e) within 21 days of disease progression or immunotherapy treatment discontinuation, (f) upon diagnosis of additional immune related adverse events, (g) upon resumption or rechallenge with immunotherapy, following treatment delay or discontinuation, (h) following treatment with immunosuppressive therapy, or during tapering, due to an immune related adverse event.

### Patient Outcomes and Clinical Phenotyping

[0162] Clinical outcomes were defined in a consistent manner across institutions. All participating and contributing health systems use an EPIC electronic health record system, enabling harmonized clinical data capture. Length-of-treatment has been shown to be an excellent proxy for ICI progression free survival (PFS), leading to its adoption by large consortia (e.g. American Association of Cancer Research (AACR) Genomics Evidence Neoplasia Information Exchange (GENIE)) as a proxy measure for ICI efficacy and also its adoption as an easily quantifiable efficacy metric for our multi-institutional cohort of patients. Toxicity outcomes were defined consistent with guidelines, and using clinical chart review, ICD9/10 codes, and clinical laboratory and pathology reports, and clinical judgment to determine the incidence of immune-related adverse events. Clinical and demographic information are collected for each patient, including the following: type of cancer, previous-line treatments, ICI treatment type, current-line concomitant therapies, treatment dose/interval, prior ICI biomarker measurements (PD-L1, TMB, MSI), tumor histology, age at ICI initiation, sex, self-reported ethnicity, smoking history (ever versus never smoker), and family history of cancer.

### Example 5: Immunoassay Protocol: Immunoprecipitation and NGS Methods

### Experimental Protocol

[0163] A peptide display immunoassay framework based on as programmable phage display, or phage immunoprecipitation sequencing (PhIP-Seq; FIG. 11), was developed; in this framework vast oligonucleotide libraries are expressed using bacteriophage display expression vectors to represent the diverse continuum of putatively neoantigenic non-wild type polypeptide, for the purpose of capturing the diverse immunoglobulin responses of the B cell compartment.

[0164] To reduce technical artifacts, and to preserve reproducibility and quality control, custom robotic liquid handling software was implemented using a liquid handler (e.g. OpenTrons OT-2, Beckman Coulter BioMek) to produce randomized sample plating of technical replicates from the patient cohort. Patient samples (e.g. serum, plasma, or alternative biofluid biospecimen) in a source microplate (e.g. 96-well or 384-well) were automatically dispensed into technical replicate (e.g. duplicate or triplicate) destination plates (e.g. FIG. 12). Ultimately, samples were randomly assigned and dispersed into microplate wells housing samples from different patients, from longitudinal timepoints from a given patient, or for experimental control samples. The mapping of sample identity to plate and well destination was stored and preserved electronically in a sample management system database.

[0165] Experimental controls were included laboratory reagents and sera, plasma, or additional biofluid (e.g. cerebrospinal fluid) including but not limited to (a) disease patient sera or plasma, (b) healthy subject sera or plasma, (c) control antibodies, and (d) phosphate-buffered saline and Protein A/G magnetic beads (FIG. 13). Diseased patient samples included biofluids from patients diagnosed with a condition involving or mediated by the immune system (e.g. autoimmune disease and cancer), or exhibiting an immune response. Healthy subjects are considered to be those who have not been clinically diagnosed with a condition involving or mediated by the immune system. Control antibodies included monoclonal or polyclonal mixtures of recombinantly expressed or purified immunoglobulins strongly targeted to verified linear peptide epitopes from particular proteins (e.g. Glial fibrillary acidic protein (GFAP), Gephyrin (GPHN), GATA binding protein 2 (GATA2)).

[0166] To quantify antibody levels, a patient biofluid sample (e.g. serum or plasma) was mixed with the phage display library, and antibodies complexed with bacteriophage library members were isolated by immunoprecipitation. Finally, phage DNA “barcodes” were NGS sequenced, giving a readout of corresponding antibodies (FIG. 9). Briefly, patient samples were mixed with T7 bacteriophage display library expressing a plurality of proteins or peptides. Protein A/G magnetic beads (or similar antibody isolation technologies) are used to immunoprecipitate complexes of immunoglobulins bound to peptide epitopes covalently bound to bacteriophage capsids. Multiple rounds of biopanning (which involves successive phage incubation, immunoprecipitation, washing, and in vivo amplification) were used to enrich for antibodies that specifically hybridized to peptide epitopes in the phage display library, and to deplete the non-specific binding interactions with the A/G beads or other peptides.

[0167] After a round of biopanning, the encoded peptide epitope sequences (“DNA barcodes”) were amplified from the bacteriophage genome by polymerase chain reaction (PCR), simultaneously adding NGS i5 and i7 adapter sequences to the resulting amplicon library. PCR products were isolated by gel electrophoresis relevant bands were excised at the relevant fragment size, and bands were purified with a gel extraction kit. High resolution electrophoretic analysis was further implemented (e.g. Agilent Bioanalyzer, Fragment Analyzer) in order to assess purity, concentration, and quality control prior to NGS analysis. Library amplicons passing quality control were then sequenced by Illumina NGS (including iSeq and NovaSeq sequencer formats) and multiplexed (up to 384 samples/lane) using different combinations of i5 and i7 adapter sequences to achieve sensitivity requirements through adequate sequencing depth. Adapter sequences include up and/or downstream randomized sequence of variable length to increase library base call diversity during sequencing.

### Quality Control

[0168] After sequencing is complete, reads were downloaded and validated against their md5sums. Reads were optionally analyzed with custom bioinformatic software to align paired reads, trim unwanted flanking sequence, correct base calls using paired call and quality information, extract vector insert sequence of relevant size, and to filter sequences not meeting quality criteria thresholds. Reads were then mapped to corresponding library members and assigned sample identifiers. A cross contamination analysis metric was then applied to samples plated together, taking into consideration their identity, proximity, and correlation as measured by cosine similarity or other correlative metrics. Samples not meeting contamination criteria were removed from subsequent analysis. Multiple technical or biological replicates of a given biospecimen or patient sample are evaluated for consistency to ensure quality and robustness (FIG. 14).

### Statistical Analysis

[0169] Antibody profiles were generated by following standard, published statistical methodology for PhIP-Seq data. Read counts were then converted to z-scores using a four-step process. First, read counts for each peptide were normalized per million reads sequenced (RPM). Second, for each sample, the expected RPM count distribution was estimated from linear regression of peptide RPM counts on the means of batch-specific mock imnnmnoprecipitations (IPs), to control for batch effects. Third, the expected variance of RPM counts was estimated using regression modeling of a large number of control IPs (e.g. >200; FIG. 15). Finally, z-scores were computed from the expected means and variances generated in the second and third steps, to determine enrichment values of antibodies against particular target peptides in the library, relative to a null distribution of mock IP controls. The vector of peptide z-scores represents the antibody profile of a given patient sample. We will determine which peptides are significantly enriched using a z-score threshold empirically determined to reflect a P-value less than an alpha level of 0.05. Alpha level correction is implemented when useful to account for multiple hypothesis testing.

### Example 6: Isolation of Neo-tAbs: Neoantigen-Targeting Antibodies

[0170] Neoantigen-targeting antibodies, or Neo-tAbs, can be detected in cancer patients

[0171] Using the described library of somatic, neoantigenic targets as immunoassay probes, PhIP-Seq screening of serum, plasma, or other biofluid from patients with cancer was implemented to isolate neoantigen-targeting antibodies, or Neo-tAbs, which the patient may harbor. For example, in a particular patient undergoing ICI treatment for advanced stage, triple-negative breast cancer, implementation of the immunoassay revealed enrichment of antibodies with affinity for two particular mutants of TP53: S215G (Serine at position 215 mutated to Glycine) and R213L (Arginine at position 213 mutated to Leucine) (FIG. 16). Mutations in TP53, a tumor suppressor protein involved in regulation of the cell cycle and DNA repair, are found across diverse tumor types at high frequency, and antibodies against wild type TP53 have been frequently identified in patients with cancer. Furthermore, as it pertains to the particular breast cancer patient assayed here, molecular pathology reports revealed multiple TP53 mutations in the patient's specific tumor, including single nucleotide variants (SNVs), insertions, and frameshifts, consistent with the observation of Anti-TP53 mutant immunoglobulins as measured by the NGS immunoassay protocol described herein. Putative neo-tAbs targeting this and other neo-antigens comprise a patient-specific antibody repertoire (FIG. 17), consistent with genetic observations from molecular pathology reports.

[0172] Neo-tAb Immune Responses are Directed Against Diverse Classes of Non-Wild Type Antigens

[0173] As mutations in cancer can be categorized into diverse classes of somatic variation, including single amino acid substitutions, insertions and deletions, frameshifts, and others, thus it follows that the antibody response targeted to non-wild type, somatically mutated targets may likewise exhibit a diverse array of targets arising via somatic mutation in cancer. In screening 300 ICI patient biospecimens from over 100 unique patients, we sought to characterize the immune response against targets arising from distinct classes of somatic mutation in cancer. In particular, it was determined that putative neo-tAbs were enriched using greater than 500 peptides targets belonging to multiple unique classes of somatic processes. In fact, among the 500 peptide antigens, 21 were found to be frameshift mutations, 274 were single amino acid substitutions, 26 were stop-gain truncations, 102 were fusion genes, 88 were alternative splicing variants, and 2 were deletions (example enriched targets are found in Table 6).

### Neo-tAbs Responses are Significantly Elevated in Cancer Patients Versus Healthy Controls

[0174] To calibrate the specificity of the non-wild type immunoassay results to patients having cancer in relation to healthy or pre-cancerous controls, we next analyzed the relative levels of enrichment of putative neo-tAb antigenic targets from ICI patients. When comparing the enrichment scores for antigens significantly associated in ICI cancer patients to the relative median level of enrichment in healthy controls, it was observed that overall enrichment scores are significantly higher for cancer patients (P<2.9*10⁻¹⁸⁷; FIG. 18). These findings suggest that neo-tAbs may have a high degree of specificity for non-wild type targets that arise specifically in the cancer proteome, in relation to wild type autoantigens.

### Example 7: Application to Checkpoint Blockade Efficacy and Toxicity Prediction

### Neo-tAb Repertoires are Correlates of Cancer Immunotherapy Efficacy

[0175] Data from a small cell lung cancer patient receiving Anti-PD-L1 checkpoint inhibitor therapy, detailed in FIG. 19, indicate that neo-tAbs can provide predictive insight into ICI therapy efficacy. The subject was diagnosed with stage IV disease and prescribed an immune checkpoint inhibitor (atezolizumab (Tecentriq) Anti-PD-L1 checkpoint inhibitor) and chemotherapy. The subject went on to experience severe celiac neuropathy after therapy was withheld due to severe nausea, vomiting, and gastroparesis, but later experienced a complete response to immunotherapy treatment. Elevated levels of antibodies against non-wild type library antigens in genes and proteins of interest (TTN, PGLYRP2, CHD7, PALD1, PDYN, RNF10), in the context of the complete response outcome for this study subject, supports the idea that the presence of certain antibodies provides insight into the efficacy of ICI therapy for cancer patients.

[0176] In clinical practice, detection of neo-tAb biomarkers offers a solution to the lack of predictive biomarkers for ICI treatment efficacy by providing an orthogonal immunoassay for quantifying the burden of immunogenic neoantigens harbored by a patient's tumor, and a new entre into monitoring ICI effectiveness. A small quantity of serum or plasma may be provided for biomarker analysis to screen for the presence or absence of predictive neo-tAbs, using a select panel of predictive public neoantigens to enrich for and quantify antibody responses, either by NGS based immunoassay (e.g. PhIP-Seq), multiplexed ELISA, or other immunoassay technology. In particular, a select panel of neoantigens associated with immunotherapeutic response may comprise a biomarker signature of ICI efficacy, providing an algorithm for clinical decision support that may indicate response likelihood for a given patient eligible for ICI therapy. Accordingly, a patient's neo-tAb signature may be computed according to this algorithm and compared to those of previously observed patients to predict ICI treatment efficacy. More specifically, this involves building a statistical predictive model using neo-tAb signatures from clinical data as input and ICI treatment outcome, either effective or ineffective, as output. Once the patient's Neo-tAb characterization is analyzed and the statistical model used to predict ICI treatment efficacy, a report is delivered to a consulting clinician or oncologist including a probability of treatment efficacy and highlighting the neo-tAbs and antigens present or absent in the patient that provide predictive value. Using this information, the physician may determine whether to move forward with ICI treatment, better calibrating the likelihood of clinical benefit against the risks of ICI toxicity. Likewise, the blood-based immunoassay test may be run to monitor treatment response at multiple time points throughout the course of therapy to provide clinicians with detailed information describing the patient's immune response dynamics, and to provide guidance for optimal therapeutic regimens, or therapeutic alternatives, throughout the course of treatment.

### Neo-tAb Repertoires are Correlates of Immune-Related Toxicity

[0177] The applicability of our immunoassay in monitoring toxic immune responses through the detection of Neo-tAbs is demonstrated in FIG. 20, which illustrates data for a small cell lung cancer patient with stage IV disease who received a combination of chemotherapy and immunotherapy (atezolizumab (Tecentriq) Anti-PD-L1 checkpoint inhibitor) and experienced severe immune related adverse events (pneumonitis and athralgia). Prior to treatment, no significant enrichment was detected from antibodies targeting antigens in the immunoassay library. At the time point following initiation of treatment and the diagnosis of the immune related toxicities pneumonitis and arthralgia, our immunoassay detected antibodies targeting a mutated form of SOX2, which has been implicated by multiple analyses in small cell lung cancer and its associated paraneoplastic autoimmune syndromes. Subsequently, the rightmost plot in FIG. 20 shows a consistent signal of increasing statistical significance for antibodies recognizing the SOX2 non-wild type antigen, illustrating the sensitivity of the assay in identifying a durable immune response to a non-wild type antigen associated with cancer and related adverse events.

[0178] From the perspective of clinical decision support for ICI, detection of wild type and non-wild type targeting neo-tAb biomarkers offers a solution to the lack of predictive biomarkers for ICI treatment toxicity by quantifying the presence of antibodies directed towards unmutated autoantigens in addition to neoantigens. Additionally, the inclusion of tissue specific protein expression data in our analysis will allow for more granular predictions of toxicities. Similar to the aforementioned protocol for ICI efficacy prediction, a small volume of patient serum or plasma will be characterized using an immunoassay panel of antigens, including neoantigens and unmutated autoantigens. This strategy is implemented in order to simultaneously profile the immune response to healthy tissues (e.g. for better resolution on irAE toxicities) while also capturing the immune response to neoplastic growths (e.g. to detect an anti-tumor response). It follows that a patient's autoantigen and neoantigen targeting characterization are used to quantify risk of ICI treatment toxicity using a statistical model, with neoantigen and autoantigen data, as well as other relevant clinicopathologic and demographic characteristics, as input and risk of toxicity as output, generated from previously developed training data and biological databases. The inclusion of tissue, organ, and organ system specific protein expression data in our analysis improves the specificity of irAE predictions, pinpointing the localization of toxicities that otherwise may occur sporadically throughout the body. In keeping with published research showing a linkage between lung cancer and skin related toxicities based on commonalities in expression patterns, for example, the detection of distinct antigen-specific expression patterns to an antigen ascertained by the immunoassay may prompt the algorithm to predict with high probability that a patient is at risk for an ICI skin toxicity such as dermatitis or Stevens-Johnson syndrome. The blood-based immunoassay test may be run before and during treatment to provide physicians with updated probabilities of organ-specific toxicity risks, allowing the medical team to determine the best regimen for treatment.

### Example 8: Application to Therapeutic Target Discovery and Antibody Discovery

### Isolation, Cloning, and Recombinant Expression of Neo-tAbs

[0179] The NGS-based immunoassay (PhIP-Seq) described here allows for novel target discovery in the context of an anti-tumor response, and in the context of an autoimmune response. The antibodies that are responsible for the signals that are probed in the PhIP-Seq assay can be isolated and the sequences cloned. The cloned antibody sequences can be synthesized, the synthesized DNA can be cloned into an expression vector, and the DNA can be used to recombinantly express antibodies and neo-tAbs in vitro. The in vitro expressed antibodies can be directly evaluated as a drug candidates in the context of an anti-tumor response, or can be used as targets to make anti-idiotypic antibodies or decoy small molecules for use as therapeutics against an autoimmune response. Furthermore, the isolated patient antibodies responsible for the signals seen in the PhIP-Seq assay can be used for future therapeutic target assessment and validation.

[0180] At each timepoint of patient sample collection, serum and plasma are isolated for usage in the PhIP-seq assay, and an additional sample of peripheral blood mononuclear cells (PBMCs) is isolated for monoclonal antibody discovery. First, antigenic targets are nominated for further validation by discovery through the aforementioned immunoassay protocol, as well as orthogonal validation immunoassay (i.e. ELISA, protein microarray, flow cytometry, western blot, cell-based overexpression assay, or radiometric ligand-binding assay). Upon the discovery and validation of a putative neo-tAb target, concurrent PBMC samples are used for Neo-tAb discovery. Specifically, PBMCs are enriched for B cells (e.g. EasySep Human B Cell Isolation Kit), and enriched B cells are bulk sorted on anti-IgG antibody binding, as well as antigen binding to recombinantly expressed and synthesized protein molecules representing the target of interest.

[0181] Single B cells are next isolated using single-cell RNA sequencing (scRNA-Seq, e.g. by 10× Genomics Chromium technology). V(D)J enriched libraries are built and NGS sequenced, followed by bioinformatic alignment, coupling and analysis (e.g. 10× Genomics Cell Ranger). The IgG sequences yielded by the bioinformatics pipeline are synthesized and cloned into an expression vector. Expi293 cells are transiently transfected with the heavy and light chain plasmids, and full length IgGs are recombinantly expressed and purified. Purified antibodies are then used to test their ability to bind antigen and for downstream characterization.

### Immunoassay-Driven Target Discovery for Novel Antigenic Targets

[0182] The antibody immune response of an ICI patient, as assayed by the NGS immunoassay protocol described herein, uniquely provides a lens into the repertoire of targeted proteins and peptides underlying a productive immune response, or potentially harmful autoimmune response. With published research now supporting that B cell responses targeting public and private tumor antigens are linked to ICI response and ICI response durability, it follows that identification of the non-wild type targets of said B cell responses may provide a vantage point into new directions for oncologic and autoimmune therapeutic target discovery. Non-wild type protein targets, in fact, may be considered to figuratively thread the needle between self and non-self, reducing the potential for autoimmune toxicity by providing a de novo target specific to the tumor and with relatively low identity to normal tissue proteins. By integrating the discovery of neo-tAb targets in a given cohort of patients receiving therapeutic treatment (e.g. with ICI) with outcomes data (i.e. the clinical observation of particular efficacy and toxicity outcomes in said patients) and protein informatics (e.g. genomic frequency and molecular histopathology), targets may be prioritized for investigation by particular drug modalities and based on their potential to elicit exceptional therapeutic benefit for patients.

### Neo-tAb Inspired Cross-Modality Therapeutic Target Discovery

[0183] Antigen-driven target discovery for novel tumor-specific targets, such as by the non-wild type NGS-based immunoassay (PhIP-Seq) detailed here, can lead to novel antigen-aware therapies. These therapies which may include monoclonal antibodies targeting tumor surface expressed antigens can be given as a combination with ICI therapies and/or in combination with each other to patients with predefined biomarker profiles. Along with canonical monoclonal antibodies, novel targets identified by PhIP-Seq can be queried by antibody-drug conjugate (ADC), T cell receptor mimic antibodies (TCRm-Abs, which recognize HLA peptide complexes, allowing targeting of intracellular tumor antigens), and chimeric antigen receptor (CAR) T cells, which combine targeting cell-surface antigens with engineered T cell activation functions. In addition to antibody and T-cell based therapies, cancer vaccines designed to primer and amplify antigen-specific T cell populations in vivo and cell-based therapies such as TIL therapy are other avenues of therapeutic cancer treatment.

[0184] With respect to autoimmune toxicities (i.e. immune related adverse events, irAEs) for ICI patients, irAE's pose a risk to ICI efficacy in the approximately 50% of patients that develop them-namely, that immunosuppression to treat irAE's may dampen the immune response in a non-specific fashion, or severe irAE's may lead to permanent discontinuation of ICI. The PhIP-seq assay is able to identify antigens that can be specifically targeted before and during ICI therapy for patients because many of the antibodies that recognize their cognate epitopes in the PhIP-seq libraries have the potential to be identified prior to treatment with ICI in patients.

[0185] Most irAE immunopathogenesis is believed to be caused by T cells, and the role of B cells remain less well characterized. Intravenous immunoglobulins (IVIGs) for example have been used in the treatment of irAEs. IVIGs induce inactivation of autoreactive T cells, downregulation of B cell activation and antibody production, interference with complement activation, and neutralization of pathogenic autoantibodies by anti-idiotypic antibodies. More focused treatments can be developed off the same principles that have shown IVIGs to work. These may include using decoy small molecules to remove antibodies targeting self-proteins and anti-idiotypic antibodies. The anti-idiotypic antibodies can be raised against antibody paratope targets that were identified in the PhIP-Seq assay and isolated using single cell sequencing. These anti-idiotypic antibodies can be used in situations where pathogenic autoantibodies are involved.

[0186] In conclusion, the inventors demonstrate the development of a novel technology for exploring antibody immune responses against non-wild type antigens arising by coding mutations to the wild type reference proteome. In doing so, they demonstrate a proof-of-concept for the isolation and characterization of a new class of antibodies referred to as neoantigen targeting antibodies, or neo-tAbs. Neo-tAbs have the benefit of being more specifically targeted to de novo peptides and proteins arising through the genomic dysregulation of diseases such as cancer. In cancer patients receiving ICI immunotherapeutics, the identification of putative neo-tAbs, as demonstrated by the inventors, empowers the identification of targets for a class of immune agents recently implicated in immunotherapeutic responses to cancer: the B cell and Plasma cell compartment. The NGS-based antibody immunoassay described herein both: (a) provides the convenience of pinpointing novel biomarkers which may be measured from small volumes of liquid biospecimen in patients initiating or undergoing therapy; and (b) provides a highly generalizable strategy for the discovery of therapeutically targetable antigens and therapeutically actionable antibodies, that may elicit additional therapeutic efficacy patients, including those on ICI therapy. The description and development of this technology by the inventors represents a significant new advance in the field of precision oncology and immune medicine, creating new opportunities for precision medicine and therapeutic discovery.

TABLE 1
Missense Mutations - Single Amino Acid Substitution

| | | | | SEQ |
|---|---|---|---|---|
| | | | | ID |
| Gene | HGVS Variant ID | Peptide Sequence | Peptide Class | NO: |
| MSH2 | NM_000251.2:p.Val606Phe | IVNISSGYVEPMQTLNDVLAQLDAV | Missense Substitution | 1. |
| | | FSFAHVSNGAPVPYVRPAILEKGQG | | |
| GRIN2A | NM_001134408.1:p.Arg846Ser | FYMLAAAMALSLITFIWEHLFYWK | Missense Substitution | 2. |
| | | LSFCFTGVCSDRPGLLFSISRGIYSC | | |
| GNA11 | NM_002067.2:p.Arg183Cys | KYYLTDVDRIATLGYLPTQQDVLR | Missense Substitution | 3. |
| | | VCVPTTGIIEYPFDLENIIFRMVDVG | | |
| TRIM50 | NM_178125.3:p.Trp13Arg | GGGGGGGGGGGGGMAWQVSLLEL | Missense Substitution | 4. |
| | | EDRLQCPICLEVFKEPLMLQCGHSY | | |
| | | CK | | |
| ATP10A | NM_024490.3:p.Ala1467Val | SSWSLVSRLGSVLQFSRTEQLADGQ | Missense Substitution | 5. |
| | | VGRGLPVQPHSGRSGLQGPDHRLLI | | |
| BRCA1 | NM_007297.3:p.Arg981Cys | FEEHSMSPEREMGNENIPSTVSTISC | Missense Substitution | 6. |
| | | NNIRENVFKEASSSNINEVGSSTN | | |
| EXOC1 | XM_005265749.1:p.Ser474Leu | DFFEVAKIKMTGTTKESKKFGLHGS | Missense Substitution | 7. |
| | | LGKLTGSTSSLNKLSVQSSGNRRSQ | | |
| FGFR2 | NM_001144913.1:p.Ala326Val | YGPDGLPYLKVLKHSGINSSNAEVL | Missense Substitution | 8. |
| | | VLFNVTEADAGEYICKVSNYIGQAN | | |
| BEST3 | XM_005268672.1:p.Pro46Ser | TLMRYVNLTSLLIFRSVSTAVYKRF | Missense Substitution | 9. |
| | | STMDHVVEAGFMTTDERKLFNHLK | | |
| | | S | | |
| TMEM2 | NM_013390.2:p.Arg291His | GLNVRVIDQDTAKILESERFDTHEY | Missense Substitution | 10. |
| | | HNESRRLQEFLRFQDPGRIVAIAVG | | |
| FAM46C | NM_017709.3:p.Gly323Trp | EEERSKYDYLMILRRVVNESTVCLM | Missense Substitution | 11 |
| | | WHERRQTLNLISLLALRVLAEQNII | | |
| FLNC | NM_001458.4:p.Pro1777Leu | QPYAPPRPGARPTHWATEEPVVPVE | Missense Substitution | 12 |
| | | LMESMLRPFNLVIPFAVQKGELTGE | | |
| HUWE1 | XM_005261965.1:p.Glu733Lys | DGTATAPPPRSNHAAEEASSEDEEE | Missense Substitution | 13. |
| | | KEVQAMQSFNSTQQNETEPNQQVV | | |
| | | G | | |
| RYR2 | XM_005273224.1:p.Cys2277Phe | ELALALREPDLEKVVRYLAGCGLQS | Missense Substitution | 14. |
| | | FQMLVSKGYPDIGWNPVEGERYLD | | |
| | | F | | |
| CDKN1A | XM_005248787.1:p.Pro38Ser | SNPPLPGQQSCCNHRDFFCSGAMSE | Missense Substitution | 15. |
| | | SAGDVRQNPCGSKACRRLFGPVDSE | | |
| LMO1 | NM_001270428.1:p.Arg33His | GVPMLSVQPKGKQKGCAGCNRKIK | Missense Substitution | 16 |
| | | DHYLLKALDKYWHEDCLKCACCD | | |
| | | CRL | | |
| ABL1 | XM_005272177.1:p.Arg635Cys | PKDKKTNLFSALIKKKKKTAPTPPK | Missense Substitution | 17. |
| | | CSSSFREMDGQPERRGAGEEEGRDI | | |
| SLC4A8 | NM_001258401.2:p.Ala410Thr | GGHSGPELQRTGRLFGGLVLDIKRK | Missense Substitution | 18. |
| | | TPWYWSDYRDALSLQCLASFLFLY | | |
| | | C | | |
| BRAF | NM_004333.4:p.Val600Gly | RDLKSNNIFLHEDLTVKIGDFGLAT | Missense Substitution | 19. |
| | | GKSRWSGSHQFEQLSGSILWMAPE | | |
| | | V | | |
| INHBA | NM_002192.2:p.Glu190Lys | NRTRTKVTIRLFQQQKHPQGSLDTG | Missense Substitution | 20. |
| | | KEAEEVGLKGERSELLLSEKVVDAR | | |
| FGFR3 | NM_000142.4:p.Arg728Leu | LFKLLKEGHRMDKPANCTHDLYMI | Missense Substitution | 21. |
| | | MLECWHAAPSQRPTFKQLVEDLDR | | |
| | | VL | | |
| MAP2K4 | NM_003010.3:p.Arg287His | RDAGCRPYMAPERIDPSASRQGYD | Missense Substitution | 22. |
| | | VHSDVWSLGITLYELATGRFPYPKW | | |
| | | N | | |
| NPAS2 | XM_005263957.1:p.Ser212Phe | SDVMDQNLLNFLPEQEHSEVYKILS | Missense Substitution | 23. |
| | | FHMLVTDSPSPEYLKLPSPSCNGFD | | |
| ATRX | XM_005262153.1:p.Thr898Met | GSSDDAERKQERETFSSAEGTVDKD | Missense Substitution | 24. |
| | | MTIMELRDRLPKKQQASASTDGVD | | |
| | | K | | |
| CBFB | NM_001755.2:p.Arg151His | EFDEERAQQEDALAQQAFEEARRR | Missense Substitution | 25 |
| | | THEFEDRDRSHREEMEVRVSQLLA | | |
| | | VT | | |
| EPHA7 | XM_005248670.1:p.Arg516Trp | STVKTKSTSASINNLKPGTVYVFQI | Missense Substitution | 26. |
| | | WAFTAAGYGNYSPRLDVATLEEAT | | |
| | | A | | |
| PCDH9 | XM_005266408.1:p.Asp970Glu | QPAFHLKPDTPVSVKKHHVIQELPL | Missense Substitution | 27. |
| | | ENTFVGGCDTLSKRSSTSSDHFSAS | | |
| BRAF | NM_004333.4:p.Val600Arg | RDLKSNNIFLHEDLTVKIGDFGLAT | Missense Substitution | 28. |
| | | RKSRWSGSHQFEQLSGSILWMAPEV | | |
| ABL1 | XM_005272177.1:p.Arg257Cys | HYPAPKRNKPTVYGVSPNYDKWE | Missense Substitution | 29. |
| | | MECTDITMKHKLGGGQYGEVYEGV | | |
| | | WKK | | |
| BARD1 | XM_005246727.1:p.Pro24Ser | GGMPDNRQPRNRQPRIRSGNEPRSA | Missense Substitution | 30. |
| | | SAMEPDGRGAWAHSRAALDRLEKL | | |
| | | L | | |
| ARFRP1 | NM_001134758.2:p.Ala114Val | YYAECHGVIYVIDSTDEERLAESKQ | Missense Substitution | 31. |
| | | VFEKVVTSEALCGVPVLVLANKQD | | |
| | | V | | |
| AMER1 | NM_152424.3:p.Arg178Cys | KAVAEKFPSMPKPKKGLKGFFSSIR | Missense Substitution | 32. |
| | | CHRKSKVTGAEQSEPGAKGPERVR | | |
| | | A | | |
| CEP192 | XM_005258107.1:p.Val1889Ile | RSQPGIKFTIPLSGYGGTSNLILEGIK | Missense Substitution | 33. |
| | | KLSDSYMVTVNGLVPGKESKIVF | | |
| JAK3 | XM_005259896.1:p.Arg963His | RQSLRLVMEYLPSGCLRDFLQRHRA | Missense Substitution | 34. |
| | | HLDASRLLLYSSQICKGMEYLGSRR | | |
| ATM | XM_005271563.1:p.Ala220Val | TKGCCSQTDGLNSKFLDFFSKAIQC | Missense Substitution | 35. |
| | | VRQEKSSSGLNHILAALTIFLKTLA | | |
| LCA5 | NM_001122769.2:p.Glu599Asp | SSFLDFQRNSMEKLSKDGVDLITRK | Missense Substitution | 36. |
| | | DKKANLMEQLFGASGSSTISSKSSD | | |
| DNAH12 | NM_178504.4:p.Asp1424Glu | ARPLSVKIVMTYRLCSEQLSSQFHY | Missense Substitution | 37. |
| | | EYGMRAVKAVLVAAGNLKLKYPN | | |
| | | EN | | |
| EGFR | XM_005271746.1:p.Thr745Met | VMASVDNPHVCRLLGICLTSTVQLI | Missense Substitution | 38. |
| | | MQLMPFGCLLDYVREHKDNIGSQY | | |
| | | L | | |
| NOTCH1 | NM_017617.3:p.Ala1707Thr | NRQCVQASSQCFQSATDVAAFLGA | Missense Substitution | 39. |
| | | LTSLGSLNIPYKIEAVQSETVEPPPP | | |
| CTNNA1 | NM_001903.2:p.Ala24Ser | GGMTAVHAGNINFKWDPKSLEIRTL | Missense Substitution | 40. |
| | | SVERLLEPLVTQVTTLVNTNSKGPS | | |
| TBATA | XM_005269615.1:p.Arg51Trp | GRKPRSPRDSGPQKELVIPGIVDFEW | Missense Substitution | 41. |
| | | IRRALRTPKPQTPGTYCFGRLSHH | | |
| GLI1 | NM_001167609.1:p.Arg40Gln | EPCCLRPLPSQGAPSVGTEVKLTKK | Missense Substitution | 42. |
| | | QALSISPLSDASLDLQTVIRTSPSS | | |
| SCUBE1 | XM_005261752.1:p.Gln609Lys | IETKMEEASDTCEADCLRKRAEQSL | Missense Substitution | 43. |
| | | KAAIKTLRKSIGRQQFYVQVSGTEY | | |
| CELSR1 | NM_014246.1:p.Arg2154Cys | ARALQLVRALRSATQHTGTLFGND | Missense Substitution | 44. |
| | | VCTAYQLLGHVLQHESWQQGFDLA | | |
| | | AT | | |
| CDH1 | XM_005256272.1:p.Val235Leu | ETGWLKVTEPLDRERIATYTLFSHA | Missense Substitution | 45. |
| | | LSSNGNAVEDPMEILITVTDQNDNK | | |
| CDKN1B | NM_004064.3:p.Val109Gly | LPEFYYRPPRPPKGACKVPAQESQD | Missense Substitution | 46. |
| | | GSGSRPAAPLIGAPANSEDTHLVDP | | |
| BRCA2 | NM_000059.3:p.Arg1512Cys | KHKILKESVPVGTGNQLVTFQGQPE | Missense Substitution | 47. |
| | | CDEKIKEPTLLGFHTASGKKVKIAK | | |
| MRPL38 | NM_032478.3:p.Arg244Gln | TSLDGHLLEPDAEYLHWLLTNIPGN | Missense Substitution | 48. |
| | | QVAEGQVTCPYLPPFPARGSGIHRL | | |
| FANCA | XM_005256296.1:p.Ala602Glu | PYYVSHFLPALLTPRVLPKVPDSRV | Missense Substitution | 49. |
| | | EFIESLKRADKIPPSLYSTYCQACS | | |
| AKT2 | XM_005258650.1:p.Arg247Trp | ERVFTEERARFYGAEIVSALEYLHS | Missense Substitution | 50. |
| | | WDVVYRDIKLENLMLDKDGHIKIT | | |
| | | D | | |
| NFE2L2 | NM_006164.4:p.Val32Gly | PPPGLPSQQDMDLIDILWRQDIDLG | Missense Substitution | 51. |
| | | GSREVFDFSQRRKEYELEKQKKLEK | | |
| CHCHD3 | XM_005250472.1:p.Arg108Trp | KRLKQAKELDRERAAANEQLTRAIL | Missense Substitution | 52. |
| | | WERICSEEERAKAKHLIKVELLWVK | | |
| SETD1B | XM_005253859.1:p.Pro1023Leu | RDRDMADTPCELAKRDPKGVGVRR | Missense Substitution | 53. |
| | | RLARPLELDSGGEEDEKESLSASSSS | | |
| GSK3B | NM_002093.3:p.Ala83Thr | DTKVIGNGSFGVVYQAKLCDSGEL | Missense Substitution | 54. |
| | | VTIKKVLQDKRFKNRELQIMRKLDH | | |
| | | C | | |
| CCND1 | NM_053056.2:p.Arg231His | GSVVAAVQGLNLRSPNNFLSYYRLT | Missense Substitution | 55. |
| | | HFLSRVIKCDPDCLRACQEQIEALL | | |
| FLT1 | NM_002019.4:p.Val980Ala | PRLDSVTSSESFASSGFQEDKSLSDA | Missense Substitution | 56. |
| | | EEEEDSDGFYKEPITMEDLISYSF | | |
| LRRC55 | NM_001005210.2:p.Arg98Trp | MHSDAGTSCPVLCTCRNQVVDCSS | Missense Substitution | 57. |
| | | QWLFSVPPDLPMDTRNLSLAHNRIT | | |
| | | A | | |
| IRS2 | NM_003749.2:p.Val1299Ile | PLPQPGDKSSWGRTRSLGGLISAVGI | Missense Substitution | 58. |
| | | GSTGGGCGGPGPGALPPANTYASI | | |
| GATA3 | XM_005252442.1:p.Pro163Leu | SSSLSGGHASPHLFTFPPTPPKDVSL | Missense Substitution | 59. |
| | | DPSLSTPGSAGSARQDEKECLKYQ | | |
| MDM2 | NM_001145337.2:p.Asp225Asn | CVIREICCERSSSSESTGTPSNPDLNA | Missense Substitution | 60. |
| | | GVYQVTVYQAGESDTDSFEEDPE | | |
| FGFR3 | NM_001163213.1:p.Gly372Cys | AEKAFWLSVHGPRAAEEELVEADE | Missense Substitution | 61. |
| | | ACSVYAGILSYGVGFFLFILVVAAV | | |
| | | T | | |
| MCL1 | NM_182763.2:p.Pro237Ser | TLRRVGDGVQRNHETAFQGWVCG | Missense Substitution | 62. |
| | | VLSCRGPRRWHQECAAGFCRCCWS | | |
| | | RSW | | |
| ABL2 | NM_001136000.2:p.Asp513Asn | RMEQPEGCPPKVYELMRACWKWS | Missense Substitution | 63. |
| | | PANRPSFAETHQAFETMFHDSSISEE | | |
| | | V | | |
| AKT2 | NM_001243027.1:p.Arg108Trp | AKVTMNDFDYLKLLGKGTFGKVIL | Missense Substitution | 64 |
| | | VWEKATGRYYAMKILRKEVIIAKD | | |
| | | EV | | |
| TNC | NM_002160.3:p.Ser1725Leu | QTVSAIATTAMGSPKEVIFSDITENL | Missense Substitution | 65. |
| | | ATVSWRAPTAQVESFRITYVPITG | | |
| BRIP1 | NM_032043.2:p.Arg160Ile | AAKLSAKKQASIYRDENDDFQVEK | Missense Substitution | 66 |
| | | KIIRPLETTQQIRKRHCFGTEVHNLD | | |
| DDR2 | XM_005245221.1:p.Asp847Tyr | DQGRQTYLPQPAICPDSVYKLMLSC | Missense Substitution | 67. |
| | | WRRYTKNRPSFQEIHLLLLQQGDEG | | |
| MYCL | XM_005270887.1:p.Arg144Cys | QSCHPKPVSSDTEDVTKRKNHNFLE | Missense Substitution | 68. |
| | | CKRRNDLRSRFLALRDQVPTLASCS | | |
| FGF4 | NM_002007.2:p.Val125Met | PDGRIGGAHADTRDSLLELSPVERG | Missense Substitution | 69 |
| | | MVSIFGVASRFFVAMSSKGKLYGSP | | |
| AR | NM_000044.3:p.Arg608Gln | FFKRAAEGKQKYLCASRNDCTIDKF | Missense Substitution | 70. |
| | | QRKNCPSCRLRKCYEAGMTLGARK | | |
| | | L | | |
| CNTNAP5 | NM_130773.3:p.Ala457Ser | MTERVAEILTGSNLNDGLWHSVSIN | Missense Substitution | 71. |
| | | SRRNRITLTLDDEAAPPAPDSTWVQ | | |
| FAM71B | NM_130899.2:p.Pro250Ser | AATSSAYAGGEGIQHASHGTASAAS | Missense Substitution | 72. |
| | | SSTSTPGAAEGGAARTAGGMAVAG | | |
| | | T | | |
| IGF2 | NM_001007139.4:p.Gly35Arg | LVLLTFLAFASCCIAAYRPSETLCGR | Missense Substitution | 73. |
| | | ELVDTLQFVCGDRGFYFSRPASRV | | |
| KIT | NM_001093772.1:p.Asp733Asn | SSCSDSTNEYMDMKPGVSYVVPTK | Missense Substitution | 74. |
| | | ANKRRSVRIGSYIERDVTPAIMEDD | | |
| | | E | | |
| CDC73 | NM_024529.4:p.Arg194Ile | QIRSLSEAMSVEKIAAIKAKIMAKKI | Missense Substitution | 75. |
| | | STIKTDLDDDITALKQRSFVDAEV | | |
| CDK6 | XM_005250107.1:p.Thr88Ala | AVLRHLETFEHPNVVRLFDVCTVSR | Missense Substitution | 76. |
| | | ADRETKLTLVFEHVDQDLTTYLDK | | |
| | | V | | |
| BRIP1 | NM_032043.2:p.Ala453Thr | NNIRKKDHEPLRAVCCSLINWLEAN | Missense Substitution | 77. |
| | | TEYLVERDYESACKIWSGNEMLLTL | | |
| CBFB | NM_001755.2:p.Ala132Thr | CVIWKGWIDLQRLDGMGCLEFDEE | Missense Substitution | 78. |
| | | RTQQEDALAQQAFEEARRRTREFED | | |
| | | R | | |
| WDFY3 | XM_005262860.1:p.Ser1940Thr | TDLDDEVGSPAEEFKAFAADTGMN | Missense Substitution | 79. |
| | | RTQSEYCNVGTKTYLTNHPAKKFV | | |
| | | FD | | |
| FLCN | XM_005256517.1:p.Ser308Leu | LVQMEKLAGIAEGGKRGSESAQNE | Missense Substitution | 80. |
| | | PLGSSPSDLGVIVVIVVISCLVCLDR | | |
| FAM211A | NM_207387.3:p.Arg132Trp | PITHDLIISLARYIHCPKPPQGCPGW | Missense Substitution | 81 |
| | | KPPRQHSGPVGNPTDLPRPGAGDQ | | |
| PCDH15 | NM_001142770.1:p.Val1492Ile | ILARNMDKIITVMSMGMKCLNMGV | Missense Substitution | 82 |
| | | AIDCYHQLDRRNMVRWLVKLRKN | | |
| | | MRR | | |
| MYCN | NM_005378.4:p.Asp31Asn | TSTMPGMICKNPDLEFDSLQPCFYP | Missense Substitution | 83 |
| | | NEDDFYFGGPDSTPPGEDIWKKFEL | | |
| KMT2C | XM_005250030.1:p.Arg56Gln | AADKRPRGRPRKDGASPFQRARKK | Missense Substitution | 84 |
| | | PQSRGKTAVEDEDSMDGLETTETET | | |
| | | I | | |
| ADAMTS5 | NM_007038.3:p.Arg188Gln | YTLKPLLRGPWAEEEKGRVYGDGS | Missense Substitution | 85 |
| | | AQILHVYTREGFSFEALPPRASCETP | | |
| MED12 | NM_005120.2:p.Arg295His | DELLKLLLPLLLRYSGEFVQSAYLS | Missense Substitution | 86 |
| | | HRLAYFCTRRLALQLDGVSSHSSHV | | |
| EP300 | NM_001429.3:p.Arg1627Trp | AGPAANSLPPIVDPDPLIPCDLMDG | Missense Substitution | 87 |
| | | WDAFLTLARDKHLEFSSLRRAQWS | | |
| | | T | | |
| FGFR4 | XM_005265839.1:p.Ser342Phe | VLYLRNVSAEDAGEYTCLAGNSIGL | Missense Substitution | 88 |
| | | FYQSAWLTVLPEEDPTWTAAAPEA | | |
| | | S | | |
| FAT1 | XM_005262835.1:p.Thr3142Met | DVNDNAPEFSADPYAITVFENTEPG | Missense Substitution | 89. |
| | | MLLTRVQATDADAGLNRKILYSLID | | |
| KMT2D | XM_005269162.1:p.Arg1312Cys | EKGRRRSSPARSRIKQGRSSSFPGRC | Missense Substitution | 90. |
| | | RPRGGAHGGRGRGRARLKSTASSI | | |
| MRE11A | NM_005590.3:p.Asp394Tyr | YSGGFEPFSVLRFSQKFVDRVANPK | Missense Substitution | 91. |
| | | YIIHFFRHREQKEKTGEEINFGKLI | | |
| MAP2K1 | XM_005254540.1:p.Tyr108Cys | PAIRNQIIRELQVLHECNSPYIVGFC | Missense Substitution | 92 |
| | | GAFYSDGEISICMEHMDGGSLDQV | | |
| CDK12 | XM_005257457.1:p.Ala1237Ser | NCKTMGSWGQEPLGPAAQEQAFTG | Missense Substitution | 93 |
| | | GSQLSLLLMENSIGGLQESHQEGEE | | |
| | | G | | |
| JUN | NM_002228.3:p.Ser37Ile | DALNASFLPSESGPYGYSNPKILKQI | Missense Substitution | 94. |
| | | MTLNLADPVGSLKPHLRAKNSDLL | | |
| CBL | NM_005188.3:p.Glu276Lys | WSSLLRNWNSLAVTHPGYMAFLTY | Missense Substitution | 95 |
| | | DKVKARLQKFIHKPGSYIFRLSCTRL | | |
| BCL6 | NM_001130845.1:p.Ala587Asp | ASHKTVHTGEKPYRCNICGAQFNRP | Missense Substitution | 96. |
| | | DNLKTHTRIHSGEKPYKCETCGARF | | |
| MSH6 | NM_001281493.1:p.Arg774His | VECIAVLDVLLCLANYSRGGDGPM | Missense Substitution | 97 |
| | | CHPVILLPEDTPPFLELKGSRHPCIT | | |
| NF1 | XM_005257986.1:p.Glu1929Gln | NTLFIVSISKTLAANEPHLTLEFLEQ | Missense Substitution | 98. |
| | | CISGFSKSSIELKHLCLEYMTPWL | | |
| MPPE1 | NM_023075.5:p.Ala265Thr | PTSAPVLLQHYPLYRRSDANCSGED | Missense Substitution | 99 |
| | | TAPAEERDIPFKENYDVLSREASQK | | |
| ARFRP1 | NM_001134758.2:p.Tyr2Cys | GGGGGGGGGGGGGGGGGGGGGG | Missense Substitution | 100. |
| | | GGMCTLLSGLYKYMFQKDEYCILIL | | |
| | | GLD | | |
| LRRC49 | XM_005254490.1:p.Thr595Ala | GKKPGIINEENNDSKRLVGENTNRA | Missense Substitution | 101. |
| | | ALNYTTRDFYNEKLEEIKEKKKFCK | | |
| MAGI2 | NM_012301.3:p.Glu1312Lys | DIKREHDVRKPKELSACGQKKQRL | Missense Substitution | 102. |
| | | GKQRERSASPQRAARPRLEEAPGGQ | | |
| | | G | | |
| CD274 | NM_014143.3:p.Asn135Ser | GVYRCMISYGGADYKRITVKVNAP | Missense Substitution | 103. |
| | | YSKINQRILVVDPVTSEHELTCQAE | | |
| | | G | | |
| CYLD | NM_001042412.1:p.Ala217Thr | DCGVFVALDKLELIEDDDTALESDY | Missense Substitution | 104. |
| | | TGPGDTMQVELPPLEINSRVSLKVG | | |
| CHEK2 | NM_145862.2:p.Arg145Gln | SCEYCFDEPLLKRTDKYRTYSKKHF | Missense Substitution | 105. |
| | | QIFREVGPKNSYIAYIEDHSGNGTF | | |
| BRCA2 | NM_000059.3:p.Ala1981Ser | DICKCSIGKLHKSVSSANTCGIFSTSS | Missense Substitution | 106. |
| | | GKSVQVSDASLQNARQVFSEIED | | |
| ARID1A | NM_006015.4:p.Arg1371Trp | QGTPSGSPFPSQQTTMYQQQQQNY | Missense Substitution | 107. |
| | | KWPMDGTYGPPAKRHEGEMYSVP | | |
| | | YST | | |
| MAP3K1 | XM_005248519.1:p.Arg169Cys | SGRITPPRRAPSPDGFSPYSPEETNCR | Missense Substitution | 108. |
| | | VNKVMRARLYLLQQIGPNSFLIG | | |
| AURKA | NM_198437.1:p.Ser387Leu | GARDLISRLLKHNPSQRPMLREVLE | Missense Substitution | 109. |
| | | HPWITANLSKPSNCQNKESASKQSG | | |
| INF2 | XM_005268005.1:p.Pro744Leu | NLRAFTEERAKLASADHFYLLLLAI | Missense Substitution | 110. |
| | | LCYQLRIECMLLCEGAAAVLDMVR | | |
| | | P | | |
| HRAS | XM_005252884.1:p.Ala134Thr | VPMVLVGNKCDLAARTVESRQAQD | Missense Substitution | 111. |
| | | LTRSYGIPYIETSAKTRQVRGTPRAA | | |
| ADAMTS12 | NM_030955.2:p.Arg604Trp | KYCTGERKRYRLCNVHPCRSEAPTF | Missense Substitution | 112. |
| | | WQMQCSEFDTVPYKNELYHWFPIF | | |
| | | N | | |
| CDKN2B | NM_004936.3:p.Ala70Val | RFGRRAIQVMMMGSARVAELLLLH | Missense Substitution | 113. |
| | | GVEPNCADPATLTRPVHDAAREGFL | | |
| | | D | | |
| AR | NM_000044.3:p.Ala736Thr | RQLVHVVKWAKALPGFRNLHVDD | Missense Substitution | 114. |
| | | QMTVIQYSWMGLMVFAMGWRSFT | | |
| | | NVNS | | |
| UCHL5 | NM_001199263.1:p.Gln307Lys | MLIEEEVQKLKRYKIENIRRKHNYL | Missense Substitution | 115. |
| | | PFIMELLKTLAEHQKLIPLVEKGKG | | |
| ARAF | NM_001256197.1:p.Asp4Asn | VGTVKVYLPNKQRTVVTVRDGMS | Missense Substitution | 116. |
| | | VYNSLDKALKVRGLNQDCCVVYRL | | |
| | | IKG | | |
| KDR | NM_002253.2:p.Pro1210Ser | SMEEDSGLSLPTSPVSCMEEEEVCD | Missense Substitution | 117. |
| | | SKFHYDNTAGISQYLQNSKRKSRPV | | |
| GATA1 | NM_002049.3:p.Ser155Leu | TSFLETLKTERLSPDLLTLGPALPSL | Missense Substitution | 118. |
| | | LPVPNSAYGGPDFSSTFFSPTGSP | | |
| FH | NM_000143.3:p.Met336Ile | KFEALAAHDALVELSGAMNTTACS | Missense Substitution | 119. |
| | | LIKIANDIRFLGSGPRSGLGELILPE | | |
| NDUFA10 | XM_005247006.1:p.Arg217Gln | SVTICDYLPPHLVIYIDVPVPEVQRQI | Missense Substitution | 120. |
| | | QKKGDPHEMKITSAYLQDIENAY | | |
| AKT1 | NM_001014431.1:p.Trp80Arg | FSVAQCQLMKTERPRPNTFIIRCLQR | Missense Substitution | 121. |
| | | TTVIERTFHVETPEEREEWTTAIQ | | |
| MDM4 | XM_005245168.1:p.Val389Ile | ITAIPEKENEGNDVPDCRRTISAPVIR | Missense Substitution | 122. |
| | | PKDAYIKKENSKLFDPCNSVEFL | | |
| MSH2 | NM_000251.2:p.Gln824Glu | NLHVTALTTEETLTMLYQVKKGVC | Missense Substitution | 123. |
| | | DESFGIHVAELANFPKHVIECAKQK | | |
| | | A | | |
| FKBP10 | XM_005257563.1:p.Gly76Asp | IPRACPREVQMGDFVRYHYNGTFE | Missense Substitution | 124. |
| | | DDKKFDSSYDRNTLVAIVVGVGRLI | | |
| | | T | | |
| FLT4 | NM_182925.4:p.Arg410His | VLKEVTEASTGTYTLALWNSAAGL | Missense Substitution | 125. |
| | | RHNISLELVVNVPPQIHEKEASSPSI | | |
| CBL | XM_005271718.1:p.Ala339Ser | HIKVTQEQYELYCEMGSTFQLCKIC | Missense Substitution | 126. |
| | | SENDKDVKIEPCGHLMCTSCLTSWQ | | |
| KEL | NM_000420.2:p.Val36Met | PRERSQAGGMGTLWSQESTPEERLP | Missense Substitution | 127. |
| | | MEGSRPWAVARRVLTAILILGLLLC | | |
| ARID2 | NM_152641.2:p.Leu381Ile | FHTVTKCLMSRDRFLKMRGMEILG | Missense Substitution | 128. |
| | | NICKAEDNGVLICEYVDQDSYREIIC | | |
| KLHL6 | NM_130446.2:p.Ala500Val | GGPNGKLATDKTQCYDPSTNKWSL | Missense Substitution | 129. |
| | | KVAMPVEAKCINAVSFRDRIYVVG | | |
| | | GA | | |
| CDH9 | NM_016279.3:p.Val297Met | TYQFNSPESVPLGTHLGRIKANDPD | Missense Substitution | 130. |
| | | MGENAEMEYSIAEGDGADMFDVIT | | |
| | | D | | |
| GATA4 | XM_005272385.1:p.Arg266His | ACGLYHKMNGINRPLIKPQRRLSAS | Missense Substitution | 131. |
| | | HRVGLSCANCQTTTTTLWRRNAEG | | |
| | | E | | |
| GABRA6 | NM_000811.2:p.Ser258Phe | YFHLQRKMGYFMIQIYTPCIMTVILF | Missense Substitution | 132. |
| | | QVSFWINKESVPARTVFGITTVLT | | |
| CCND2 | NM_001759.3:p.Pro281Arg | DCLKACQEQIEAVLLNSLQQYRQD | Missense Substitution | 133. |
| | | QRDGSKSEDELDQASTRTDVRDIDL | | |
| | | G | | |
| COL12A1 | NM_080645.2:p.Val470Ile | EVEVDRSETSTSLKDLFSQTLYTVSI | Missense Substitution | 134. |
| | | SAVHDEGESPPVTAQETTRPVPAP | | |
| BRD4 | NM_058243.2:p.Ala1189Val | PPEQNAPPPGAPDKDKQKQEPKTPV | Missense Substitution | 135. |
| | | VPKKDLKIKNMGSWASLVQKHPTT | | |
| | | P | | |
| AGPAT5 | NM_018361.3:p.Phe295Leu | VPEEQEHMRRWLHERFEIKDKMLIE | Missense Substitution | 136. |
| | | LYESPDPERRKRFPGKSVNSKLSIK | | |
| CCND3 | NM_001136125.1:p.Arg37Ser | APRAGPDPRLLGDQRVLQSLLRLEE | Missense Substitution | 137. |
| | | SYVPRASYFQCVQREIKPHMRKML | | |
| | | A | | |
| DOT1L | XM_005259660.1:p.Gly1386Ser | GSDANPFLSKRQLDGLAGLKGEGSR | Missense Substitution | 138. |
| | | SKEAGEGGLPLCGPTDKTPLLSGKA | | |
| ZNF510 | XM_005251808.1:p.Arg619Ile | TGEKPFKCNECGKKFVRKAILSDHQ | Missense Substitution | 139. |
| | | IIHTGEKPFQCNKCGKTFGQKSNLR | | |
| LRP1B | NM_018557.2:p.Cys2577Tyr | CRRGFKPCYNRRCIPHGKLCDGEND | Missense Substitution | 140. |
| | | YGDNSDELDCKVSTCATVEFRCAD | | |
| | | G | | |
| BTK | NM_000061.2:p.Arg468His | IEEAKVMMNLSHEKLVQLYGVCTK | Missense Substitution | 141. |
| | | QHPIFIITEYMANGCLLNYLREMRH | | |
| | | R | | |
| ERRFI1 | NM_018948.3:p.Pro320Leu | KPDYRRWSAEVTSSTYSDEDRPPKV | Missense Substitution | 142. |
| | | LPREPLSPSNSRTPSPKSLPSYLNG | | |
| BCL2L1 | XM_005260481.1:p.Glu98Lys | SSLDAREVIPMAAVKQALREAGDEF | Missense Substitution | 143 |
| | | KLRYRRAFSDLTSQLHITPGTAYQS | | |
| CSF1R | NM_005211.3:p.Ala781Val | LHFSSQVAQGMAFLASKNCIHRDV | Missense Substitution | 144 |
| | | AVRNVLLTNGHVAKIGDFGLARDI | | |
| | | MN | | |
| CRKL | NM_005207.3:p.Glu54Lys | QGQRHGMFLVRDSSTCPGDYVLSV | Missense Substitution | 145. |
| | | SKNSRVSHYIINSLPNRRFKIGDQEF | | |
| KAT6A | NM_006766.3:p.Arg311Gln | RGFHMECCDPPLTRMPKGMWICQI | Missense Substitution | 146. |
| | | CQPRKKGRKLLQKKAAQIKRRYTN | | |
| | | PI | | |
| MTOR | XM_005263439.1:p.Phe1661Leu | SPLQKKVTEDLSKTLLMYTVPAVQ | Missense Substitution | 147. |
| | | GLFRSISLSRGNNLQDTLRVLTLWF | | |
| | | D | | |
| ZNF804B | NM_181646.2:p.Lys82Thr | CELCDKQYHKHQEFDNHINSYDHA | Missense Substitution | 148. |
| | | HTQRLKELKQREFARNVASKSWKD | | |
| | | EK | | |
| CTNNB1 | NM_001904.3:p.Asp32Asn | LMELDMAMEPDRKAAVSHWQQQS | Missense Substitution | 149. |
| | | YLNSGIHSGATTTAPSLSGKGNPEEE | | |
| | | D | | |
| FGF10 | NM_004465.1:p.Val33Ile | HCASAFPHLPGCCCCCFLLLFLVSSI | Missense Substitution | 150. |
| | | PVTCQALGQDMVSPEATNSSSSSF | | |
| FLG | NM_002016.1:p.Ala1805Val | GRTGPSTGGRQRSRHEQARDSSRHS | Missense Substitution | 151. |
| | | VSQEGQDTIRGHPGSSRGGRQGSHY | | |
| FOXP1 | NM_001012505.1:p.Ala52Thr | LECGGLREGRSNGETPAVDIGAADL | Missense Substitution | 152. |
| | | THAQQQQQQWHLINHQPSRSPSSW | | |
| | | L | | |
| ETV4 | NM_001986.2:p.Ala267Thr | VDQGGVNGHRYPGAGVVIKQEQTD | Missense Substitution | 153. |
| | | FTYDSDVTGCASMYLHTEGFSGPSP | | |
| | | G | | |
| IDH1 | XM_005246522.1:p.Gly8Ser | GGGGGGGGGGGGGGGGGGMSKKI | Missense Substitution | 154. |
| | | SGSSVVEMQGDEMTRIIWELIKEKLI | | |
| | | F | | |
| IL13RA2 | NM_000640.2:p.Arg343His | DDGIWSEWSDKQCWEGEDLSKKTL | Missense Substitution | 155. |
| | | LHFWLPFGFILILVIFVTGLLLRKPN | | |
| KCNA2 | NM_004974.3:p.Val170Ala | FQRQVWLLFEYPESSGPARIIAIVSA | Missense Substitution | 156. |
| | | MVILISIVSFCLETLPIFRDENED | | |
| ERBB3 | NM_001982.3:p.Gly284Arg | CPQPLVYNKLTFQLEPNPHTKYQYG | Missense Substitution | 157. |
| | | RVCVASCPHNFVVDQTSCVRACPP | | |
| | | D | | |
| PTX4 | NM_001013658.1:p.His214Asn | TQPEELGPTSLKLQRDRQELRAASE | Missense Substitution | 158. |
| | | NRGPPQDSSAPLQGRREPPASGSHR | | |
| DHDH | NM_014475.3:p.Asp38Asn | ISSDFTAVLQTLPRSEHQVVAVAAR | Missense Substitution | 159. |
| | | NLSRAKEFAQKHDIPKAYGSYEELA | | |
| SLC46A3 | XM_005266361.1:p.Phe140Cys | SVWLCLLCYFAFPFQLLIASTFIGAC | Missense Substitution | 160. |
| | | CGNYTTFWGACFAYIVDQCKEHKQ | | |
| BRD4 | NM_058243.2:p.Ala40Thr | PVMGDGLETSQMSTTQAQAQPQPA | Missense Substitution | 161. |
| | | NTASTNPPPPETSNPNKPKRQTNQL | | |
| | | Q | | |
| FMO2 | NM_001460.3:p.Ala445Val | FGESQSQTLQTNYVDYLDELALEIG | Missense Substitution | 162. |
| | | VKPDFCSLLFKDPKLAVRLYFGPCN | | |
| DNMT3A | NM_153759.3:p.Asn690Ser | EKEDILWCTEMERVFGFPVHYTDVS | Missense Substitution | 163. |
| | | SMSRLARQRLLGRSWSVPVIRHLFA | | |
| IFT140 | NM_014714.3:p.Ser1187Leu | QNMSITEEMAEKMTVAKDSSDLPE | Missense Substitution | 164. |
| | | ELRRELLEQIADCCMRQGSYHLATK | | |
| | | K | | |
| ADAMTS5 | NM_007038.3:p.Ala243Thr | AHEHAPAHSNPSGRAALASQLLDQS | Missense Substitution | 165. |
| | | TLSPAGGSGPQTWWRRRRRSISRAR | | |
| CREBBP | XM_005255125.1:p.Ala1527Thr | PVINTLPPIVDPDPLLSCDLMDGRDT | Missense Substitution | 166. |
| | | FLTLARDKHWEFSSLRRSKWSTLC | | |
| GRM3 | XM_005250290.1:p.Arg162Trp | NIPLLIAGVIGGSYSSVSIQVANLLW | Missense Substitution | 167. |
| | | LFQIPQISYASTSAKLSDKSRYDY | | |
| MYB | NM_001161660.1:p.Gly305Glu | IQTQNHTCSYPGWHSTTIADHTRPH | Missense Substitution | 168. |
| | | EDSAPVSCLGEHHSTPSLPADPGSL | | |
| B3GAT2 | XM_005248658.1:p.Val426Ile | LFFADDDNTYSLELFQEMRTTRKVS | Missense Substitution | 169. |
| | | IWPVGLVGGRRYERPLVENGKVVG | | |
| | | W | | |
| ETV5 | NM_004454.2:p.Ala192Val | GPVQGVGPAPAPHSLPEPGPQQQTF | Missense Substitution | 170. |
| | | VVPRPPHQPLQMPKMMPENQYPSE | | |
| | | Q | | |
| LZTR1 | NM_006767.3:p.Arg97Trp | TVVAYKDAIYVFGGDNGKTMLNDL | Missense Substitution | 171. |
| | | LWFDVKDCSWCRAFTTGTPPAPRY | | |
| | | HH | | |
| C11orf30 | NM_020193.3:p.Arg62Cys | AQGDLTKEKKDLLGELSKVLSISTE | Missense Substitution | 172. |
| | | CHRAEVRRAVNDERLTTIAHNMSG | | |
| | | P | | |
| CIC | XM_005258673.1:p.Ser1103Thr | QLPPACAAPGGPVITAFYSGSPAPTT | Missense Substitution | 173. |
| | | SAPLAQPSQAPPSLVYTVATSTTP | | |
| FOXL2 | NM_023067.3:p.Pro351Ser | SPATAAPPAPAPTSAPGLQFACARQ | Missense Substitution | 174. |
| | | SELAMMHCSYWDHDSKTGALHSRL | | |
| | | D | | |
| CCT2 | NM_006431.2:p.Ala398Val | IVLRGATQQILDEAERSLHDALCVL | Missense Substitution | 175. |
| | | VQTVKDSRTVYGGGCSEMLMAHA | | |
| | | VT | | |
| BRAF | NM_004333.4:p.Val600Met | RDLKSNNIFLHEDLTVKIGDFGLAT | Missense Substitution | 176. |
| | | MKSRWSGSHQFEQLSGSILWMAPE | | |
| | | V | | |
| FANCL | NM_001114636.1:p.Arg68Gln | PEDLQLKNARLLCSWQLRTILSGYH | Missense Substitution | 177. |
| | | QIVQQRMQHSPDLMSFMMELKMLL | | |
| | | E | | |
| EPHB1 | NM_004441.4:p.Arg327His | TCRTGYYRADFDPPEVACTSVPSGP | Missense Substitution | 178. |
| | | HNVISIVNETSIILEWHPPRETGGR | | |
| SCAI | NM_173690.4:p.Asp84Tyr | FALKEIMSSGGAEDDIPQGERKTVT | Missense Substitution | 179. |
| | | YFCYLLDKSKQLFNGLRDLPQYGQ | | |
| | | K | | |
| MEF2B | NM_001145785.1:p.Glu321Asp | GRSLGEEGPPTRGASPPTPPVSIKSD | Missense Substitution | 180. |
| | | RLSPAPGGPGDFPKTFPYPLLLAR | | |
| AMER1 | NM_152424.3:p.Glu227Lys | ARPHEHVSSAPQVPCFEETFQAPRK | Missense Substitution | 181. |
| | | KNANPQDAPGPKVSPTPEPSPPATE | | |
| FGFR2 | NM_000141.4:p.Gly298Asp | DVEFVCKVYSDAQPHIQWIKHVEK | Missense Substitution | 182. |
| | | NDSKYGPDGLPYLKVLKAAGVNTT | | |
| | | DK | | |
| CARD11 | XM_005249891.1:p.Ala1033Val | IVTRDEFLRRQKTETIIYSREKNPNV | Missense Substitution | 183. |
| | | FECIAPANIEAVAAKNKHCLLEAG | | |
| FAT4 | XM_005263209.1:p.Gly505Cys | YRVNLSEEAPPGSYVSGISATDGDS | Missense Substitution | 184. |
| | | CLNANLRYSIVSGNGLGWFHISEHS | | |
| MTOR | XM_005263439.1:p.Arg542His | SGIGRIKEQSARMLGHLVSNAPRLIH | Missense Substitution | 185. |
| | | PYMEPILKALILKLKDPDPDPNPG | | |
| AKT3 | XM_005272995.1:p.Arg367Gln | GRLPFYNQDHEKLFELILMEDIKFPQ | Missense Substitution | 186. |
| | | TLSSDAKSLLSGLLIKDPNKRLGG | | |
| GRIA2 | NM_001083619.1:p.Ser613Leu | STNEFGIFNSLWFSLGAFMQQGCDI | Missense Substitution | 187. |
| | | LPRSLSGRIVGGVWWFFTLIIISSY | | |
| CDK8 | NM_001260.1:p.Arg125Trp | AEHDLWHIIKFHRASKANKKPVQLP | Missense Substitution | 188. |
| | | WGMVKSLLYQILDGIHYLHANWVL | | |
| | | H | | |
| AXIN1 | XM_005255607.1:p.Pro110Leu | DPRPASYSFCSGKGVGIKGETSTATL | Missense Substitution | 189. |
| | | RRSDLDLGYEPEGSASPTPPYLKW | | |
| GID4 | NM_024052.4:p.Leu171Ile | QHVDTGNSYLCGYLKIKGLTEEYPT | Missense Substitution | 190. |
| | | ITTFFEGEIISKKHPFLTRKWDADE | | |
| OR51E2 | NM_030774.3:p.Ala249Thr | VLQLPSKSERAKAFGTCVSHIGVVL | Missense Substitution | 191. |
| | | TFYVPLIGLSVVHRFGNSLHPIVRV | | |
| TAF7L | XM_005262152.1:p.Arg237Trp | PGFLISSGMSSHKQGHTSSVEYDML | Missense Substitution | 192. |
| | | WEMFSDSRSNNDDDEDEDDEDEDE | | |
| | | D | | |
| LPPR1 | NM_207299.1:p.Leu186Met | KPNYTSADCQAHHQFINNGNICTGD | Missense Substitution | 193. |
| | | MEVIEKARRSFPSKHAALSIYSALY | | |
| ABL2 | NM_001136000.2:p.Glu440Gln | LSRLMTGDTYTAHAGAKFPIKWTA | Missense Substitution | 194 |
| | | PQSLAYNTFSIKSDVWAFGVLLWEI | | |
| | | A | | |
| TTC3 | XM_005261052.1:p.Gln811Arg | ERMEEDLRESNPPKNEEQKETVDN | Missense Substitution | 195. |
| | | VRRCQFLDDRILQCIKQYADKIKSGI | | |
| JAK2 | NM_004972.3:p.Arg133Trp | TRHNVLYRIRFYFPRWYCSGSNRAY | Missense Substitution | 196. |
| | | WHGISRGAEAPLLDDFVMSYLFAQ | | |
| | | W | | |
| LRP1B | NM_018557.2:p.Val673Met | RGIVVDPVNGWMYWTDWEEDEID | Missense Substitution | 197. |
| | | DSMGRIEKAWMDGFNRQIFVTSKM | | |
| | | LWP | | |
| NF2 | NM_181830.2:p.Lys40Asn | KRKQPKTFTVRIVTMDAEMEFNCE | Missense Substitution | 198. |
| | | VNKQILDEKIYCPPEASVLLASYAV | | |
| | | Q | | |
| SLC20A2 | XM_005273614.1:p.Arg239Gln | AIALISFGVALLFAFFVWLFVCPWM | Missense Substitution | 199. |
| | | QRKITGKLQKEGALSRVSDESLSKV | | |
| FBXW7 | NM_033632.3:p.Gly687Glu | NLVTLESGGSGGVVWRIRASNTKL | Missense Substitution | 200. |
| | | VCAVESRNGTEETKLLVLDFDVDM | | |
| | | KG | | |
| ETV6 | NM_001987.4:p.Ala40Val | ISYTPPESPVPSYASSTPLHVPVPRVL | Missense Substitution | 201. |
| | | RMEEDSIRLPAHLRLQPIYWSRD | | |
| FANCE | XM_005248888.1:p.Arg106Trp | LELKPLLLRLPRICQRNLMSLLMAV | Missense Substitution | 202. |
| | | WPSLPESGLLSVLQIAQQDLAPDPD | | |
| BCL2 | XM_005266735.1:p.Val134Ala | RRDFAEMSSQLHLTPFTARGRFATV | Missense Substitution | 203. |
| | | AEELFRDGVNWGRIVAFFEFGGVM | | |
| | | C | | |
| ERG | NM_001136155.1:p.Arg293Cys | MNYDKLSRALRYYYDKNIMTKVH | Missense Substitution | 204. |
| | | GKCYAYKFDFHGIAQALQPHPPESS | | |
| | | LY | | |
| DENND5A | NM_015213.3:p.Glu224Gln | DTLYVSKCICLITPMSFMKACRSVL | Missense Substitution | 205. |
| | | QQLHQAVTSPQPPPLPLESYIYNVL | | |
| DHX57 | NM_198963.1:p.Pro998Thr | CFHLFTSHHYNHQLLKQQLPEIQRV | Missense Substitution | 206. |
| | | TLEQLCLRIKILEMFSAHNLQSVFS | | |
| GATA6 | NM_005257.4:p.Arg439Trp | CGLYSKMNGLSRPLIKPQKRVPSSR | Missense Substitution | 207. |
| | | WLGLSCANCHTTTTTLWRRNAEGE | | |
| | | P | | |
| BRD4 | NM_058243.2:p.Ala1062Asp | QQVIQHHHSPRHHKSDPYSTGHLRE | Missense Substitution | 208. |
| | | DPSPLMIHSPQMSQFQSLTHQSPPQ | | |
| H3F3A | NM_002107.4:p.Lys37Asn | TGGKAPRKQLATKAARKSAPSTGG | Missense Substitution | 209. |
| | | VNKPHRYRPGTVALREIRRYQKSTE | | |
| | | L | | |
| KANK4 | NM_181712.4:p.Asp907Asn | LLREGNVNIQATQGGQTALMLGVS | Missense Substitution | 210. |
| | | HNREDMVQALLSCQADVNLQDHD | | |
| | | GSS | | |
| IL10RB | XM_005260971.1:p.Trp26Leu | MQVEVLADSLHMRFLAPKIENEYET | Missense Substitution | 211. |
| | | LTMKNVYNSWTYNVQYWKNGTDE | | |
| | | KF | | |
| HINFP | NM_198971.2:p.Ala493Val | NQTNAQGQQEIVYYVLSEAPGEPPP | Missense Substitution | 212. |
| | | VPEPPSGGIMEKLQGIAEEPEIQMV | | |
| NPL | XM_005245505.1:p.Gly180Val | FSDTDLLDFGQCVDQNRQQQFAFLF | Missense Substitution | 213. |
| | | VVDEQLLSALVMGATGAVGSTYNY | | |
| | | L | | |
| PDCL2 | XM_005265728.1:p.Arg36Cys | NDILRDFGILPPKEESKDEIEEMVLC | Missense Substitution | 214. |
| | | LQKEAMVKPFEKMTLAQLKEAEDE | | |
| NBPF9 | NM_001037675.3:p.Met316Arg | QESEEEEVPQESWDEGYSTPSIPPER | Missense Substitution | 215. |
| | | LASYKSYSSTFHSLEEQQVCMAVD | | |
| ATR | NM_001184.3:p.Arg1015Gln | FLTRTLQVLLPDLAAKASPAASALI | Missense Substitution | 216. |
| | | QTLGKQLNVNRREILINNFKYIFSH | | |
| ASXL1 | NM_015338.5:p.Ala215Thr | FSGCHADGESGSPSSSSSGSLALGST | Missense Substitution | 217. |
| | | AIRGQAEVTQDPAPLLRGFRKPAT | | |
| KIT | NM_001093772.1:p.Asp812Tyr | RDLAARNILLTHGRITKICDFGLARY | Missense Substitution | 218. |
| | | IKNDSNYVVKGNARLPVKWMAPES | | |
| ACVR1B | NM_020327.3:p.Arg149His | DKTLQDLVYDLSTSGSGSGLPLFVQ | Missense Substitution | 219. |
| | | HTVARTIVLQEIIGKGRFGEVWRGR | | |
| MEFV | XM_005255319.1:p.Ser273Leu | STGEKAPANPEILLTLEEKTAANLDL | Missense Substitution | 220. |
| | | ATEPRARPTPDGGASADLKEGPGN | | |
| AXL | NM_001278599.1:p.Ala5Val | GGGGGGGGGGGGGGGGGGGGGM | Missense Substitution | 221. |
| | | GIQVGEPDPPEEPLTSQASVPPHQLR | | |
| | | LG | | |
| BRAF | NM_004333.4:p.Val600Lys | RDLKSNNIFLHEDLTVKIGDFGLAT | Missense Substitution | 222. |
| | | KKSRWSGSHQFEQLSGSILWMAPE | | |
| | | V | | |
| ALK | NM_004304.4:p.Ala704Thr | PTVHWLFTTCGASGPHGPTQAQCN | Missense Substitution | 223. |
| | | NTYQNSNLSVEVGSEGPLKGIQIWK | | |
| | | V | | |
| FGF14 | NM_175929.2:p.Pro6Thr | GGGGGGGGGGGGGGGGGGGGMV | Missense Substitution | 224. |
| | | KPVTLFRRTDFKLLLCNHKDLFFLR | | |
| | | VSK | | |
| APC | NM_001127510.2:p.Arg230Cys | GTCQDMEKRAQRRIARIQQIEKDIL | Missense Substitution | 225. |
| | | CIRQLLQSQATEAERSSQNKHETGS | | |
| CTCF | NM_001191022.1:p.Arg187His | KNEKRFKCDQCDYACRQERHMIMH | Missense Substitution | 226. |
| | | KHTHTGEKPYACSHCDKTFRQKQL | | |
| | | LD | | |
| ESCO1 | NM_052911.2:p.Arg300Gln | TLPKSPQPSVPEQSDNELEQAGKSK | Missense Substitution | 227. |
| | | QGSILQLCEEIAGEIESDNVEVKKE | | |
| KEAP1 | XM_005260174.1:p.Asp236Asn | FGEVAKQEEFFNLSHCQLVTLISRD | Missense Substitution | 228. |
| | | NLNVRCESEVFHACINWVKYDCEQ | | |
| | | R | | |
| EPHA3 | XM_005264715.1:p.Glu264Lys | PPRMYCSTEGEWLVPIGKCSCNAGY | Missense Substitution | 229. |
| | | KERGFMCQACRPGFYKALDGNMK | | |
| | | CA | | |
| OR51I1 | NM_001005288.2:p.Asp212Asn | MKVACGDIHVNNIYGLLVIIFTYGM | Missense Substitution | 230. |
| | | NSTFILLSYALILRAMLVIISQEQR | | |
| MAGEB1 | NM_177415.2:p.Tyr230Phe | LGVIFLKGNSATEEEIWKFMNVLGA | Missense Substitution | 231. |
| | | FDGEEHLIYGEPRKFITQDLVQEKY | | |
| KRAS | NM_004985.3:p.Leu19Phe | GGGGGGGMTEYKLVVVGAGGVGK | Missense Substitution | 232. |
| | | SAFTIQLIQNHFVDEYDPTIEDSYRK | | |
| | | Q | | |
| NFKBIA | NM_020529.2:p.Arg143Gln | AVITNQPEIAEALLGAGCDPELRDF | Missense Substitution | 233. |
| | | QGNTPLHLACEQGCLASVGVLTQS | | |
| | | C | | |
| APC | NM_001127510.2:p.Arg259Trp | LLQSQATEAERSSQNKHETGSHDAE | Missense Substitution | 234. |
| | | WQNEGQGVGEINMATSGNGQGSTT | | |
| | | R | | |
| EPHA4 | NM_004438.3:p.Ala618Thr | VRTYVDPFTYEDPNQAVREFAKEID | Missense Substitution | 235. |
| | | TSCIKIEKVIGVGEFGEVCSGRLKV | | |
| MAP2K2 | NM_030662.3:p.Ala80Val | EAFLTQKAKVGELKDDDFERISELG | Missense Substitution | 236. |
| | | VGNGGVVTKVQHRPSGLIMARKLI | | |
| | | H | | |
| CCNE1 | NM_001238.2:p.Arg240Cys | YVTDGACSGDEILTMELMIMKALK | Missense Substitution | 237. |
| | | WCLSPLTIVSWLNVYMQVAYLNDL | | |
| | | HE | | |
| FGF23 | NM_020638.2:p.Val192Met | IHFNTPIPRRHTRSAEDDSERDPLNM | Missense Substitution | 238. |
| | | LKPRARMTPAPASCSQELPSAEDN | | |
| FGFR1 | NM_023106.2:p.Lys328Glu | VIVYKMKSGTKKSDFHSQMAVHKL | Missense Substitution | 239. |
| | | AESIPLRRQVTVSADSSASMNSGVL | | |
| | | L | | |
| BTG1 | NM_001731.2:p.Ser43Asn | AVSFISKFLRTKGLTSERQLQTFSQN | Missense Substitution | 240. |
| | | LQELLAEHYKHHWFPEKPCKGSGY | | |
| FANCD2 | NM_033084.3:p.Gln802His | KERSFMCSLIFLTLNWFREIVNAFCH | Missense Substitution | 241. |
| | | ETSPEMKGKVLTRLKHIVELQIIL | | |
| CCDC73 | NM_001008391.3:p.Val569Ala | AIETEKIHLERTRGLDVHHTDVNLE | Missense Substitution | 242. |
| | | AENNKTSFNSILNETAHNTYHNNNK | | |
| EZH2 | NM_152998.2:p.Glu210Lys | FEAISSMFPDKGTAEELKEKYKELT | Missense Substitution | 243. |
| | | KQQLPGALPPECTPNIDGPNAKSVQ | | |
| HSPG2 | XM_005245865.1:p.Thr1906Pro | TQQRHQGSELHFPSVQPSDAGVYIC | Missense Substitution | 244. |
| | | PCRNLHQSNTSRAELLVTEAPSKPI | | |
| ESR1 | NM_001122742.1:p.Ala68Thr | YLDSSKPAVYNYPEGAAYEFNAAA | Missense Substitution | 245. |
| | | ATNAQVYGQTGLPYGPGSEAAAFG | | |
| | | SN | | |
| SHROOM2 | NM_001649.2:p.Asp701Asn | LAGTYKDHLKEAQARVLRATSFKR | Missense Substitution | 246. |
| | | RNLDPNPGDLYPESLEHRMGDPDT | | |
| | | VP | | |
| GPR124 | XM_005273470.1:p.Ala525Thr | HLLWLAQREDKACSRIVGALERIGG | Missense Substitution | 247. |
| | | TALSPHAQHISVELSAFPREVGGAG | | |
| AKT1 | NM_001014431.1:p.Gln79Lys | NFSVAQCQLMKTERPRPNTFIIRCLK | Missense Substitution | 248. |
| | | WTTVIERTFHVETPEEREEWTTAI | | |
| CRLF2 | NM_001012288.1:p.Ala65Asp | YRSPFDTEWQSKQENTCNVTIEGLD | Missense Substitution | 249. |
| | | DEKCYSFWVRVKAMEDVYGPDTY | | |
| | | PS | | |
| ZNF280A | NM_080740.3:p.Asp241Tyr | SSNHVQNGVTFPWPDANGKAHFNL | Missense Substitution | 250. |
| | | TYPERANESGLAMTDISSLASQNKT | | |
| | | F | | |
| BRCA1 | NM_007297.3:p.Arg1156Gln | SKSVQKGELSRSPSPFTHTHLAQGY | Missense Substitution | 251. |
| | | QRGAKKLESSEENLSSEDEELPCFQ | | |
| FANCG | XM_005251404.1:p.Arg155Cys | CLLPELLSALHRLVGLQAALWLSAD | Missense Substitution | 252. |
| | | CLGDLALLLETLNGSQSGASKDLLL | | |
| ZMYND8 | XM_005260374.1:p.Pro127Thr | PQDGRNDFYCWVCHREGQVLCCEL | Missense Substitution | 253. |
| | | CTRVYHAKCLRLTSEPEGDWFCPEC | | |
| | | E | | |
| MYD88 | NM_001172568.1:p.Leu220Pro | YLQSKECDFQTKFALSLSPGAHQKR | Missense Substitution | 254. |
| | | PIPIKYKAMKKEFPSILRFITVCDY | | |
| DNAH2 | NM_020877.2:p.Arg3426Gln | ALKWIKNMEGGQGLKIIDLQMSDY | Missense Substitution | 255. |
| | | LQILEHAIHFGYPVLLQNVQEYLDP | | |
| | | T | | |
| KDM5C | XM_005262040.1:p.Asp352Asn | ADISGMKVPWLYVGMVFSAFCWHI | Missense Substitution | 256. |
| | | ENHWSYSINYLHWGEPKTWYGVPS | | |
| | | LA | | |
| NRXN3 | XM_005268218.1:p.Asp625Asn | NRAGLILPTELWTAMLNYGYVGCIR | Missense Substitution | 257. |
| | | NLFIDGRSKNIRQLAEMQNAAGVKS | | |
| IGF1R | XM_005254897.1:p.Tyr764Cys | GLILMYEIKYGSQVEDQRECVSRQE | Missense Substitution | 258. |
| | | CRKYGGAKLNRLNPGNYTARIQAT | | |
| | | S | | |
| GATA2 | NM_032638.4:p.Ala411Val | LTMKKEGIQTRNRKMSNKSKKSKK | Missense Substitution | 259. |
| | | GVECFEELSKCMQEKSSPFSAAALA | | |
| | | G | | |
| IL7R | NM_002185.3:p.Thr327Met | SFLDCQIHRVDDIQARDEVEGFLQD | Missense Substitution | 260. |
| | | MFPQQLEESEKQRLGGDVQSPNCPS | | |
| HNF1A | NM_000545.5:p.Glu88Asp | GLGETRGSEDETDDDGEDFTPPILK | Missense Substitution | 261. |
| | | DLENLSPEEAAHQKAVVETLLQEDP | | |
| KDM6A | XM_005272658.1:p.Glu1075Lys | GPFKTIKFGTNIDLSDDKKWKLQLH | Missense Substitution | 262. |
| | | KLTKLPAFVRVVSAGNLLSHVGHTI | | |
| BCL2L2 | XM_005267966.1:p.Gln133Arg | AESVNKEMEPLVGQVQEWMVAYL | Missense Substitution | 263. |
| | | ETRLADWIHSSGGWAEFTALYGDG | | |
| | | ALE | | |
| CD48 | NM_001256030.1:p.Thr208Met | TTLMPHNYSRCYTCQVSNSVSSKN | Missense Substitution | 264. |
| | | GMVCLSPPCTLGKKDPWELRGAQG | | |
| | | NW | | |
| DAXX | XM_005248859.1:p.Arg672Gln | KEKKQTGSGPLGNSPAVPNPPFTAS | Missense Substitution | 265. |
| | | SAWYLQDKCGHTMQSRRDHRALR | | |
| | | LG | | |
| MEN1 | NM_130799.2:p.Arg332His | ASAKTYYRDEHIYPYMYLAGYHCR | Missense Substitution | 266. |
| | | NHNVREALQAWADTATVIQDYNY | | |
| | | CRE | | |
| ARAF | NM_001256196.1:p.Arg151Cys | QTCGYKFHQHCSSKVPTVCVDMST | Missense Substitution | 267. |
| | | NCQQPSRFYHSVQDLSGGSRQHEAP | | |
| | | S | | |
| ACVR1B | NM_020327.3:p.Arg187Cys | GKGRFGEVWRGRWRGGDVAVKIFS | Missense Substitution | 268. |
| | | SCEERSWFREAEIYQTVMLRHENIL | | |
| | | G | | |
| ARID2 | NM_152641.2:p.Arg247Cys | GEEWKEKTDRDFVKFWKDIVDDNE | Missense Substitution | 269. |
| | | VCDLISDRNKSHEGTSGEWIWESLF | | |
| | | H | | |
| FLT3 | NM_004119.2:p.Ala181Ser | FTVSIRNTLLYTLRRPYFRKMENQD | Missense Substitution | 270. |
| | | SLVCISESVPEPIVEWVLCDSQGES | | |
| TECTA | NM_005422.2:p.Asn886Ser | CLPNGKCTDNLAVFLESWTTFEEIC | Missense Substitution | 271. |
| | | SGECGDLLKACNNDSELLKFYRSRS | | |
| ALK | NM_004304.4:p.Ala1200Val | NHQNIVRCIGVSLQSLPRFILLELMV | Missense Substitution | 272. |
| | | GGDLKSFLRETRPRPSQPSSLAML | | |
| MITF | NM_000248.3:p.Pro179Ser | LIDLYGNQGLPPPGLTISNSCPANLS | Missense Substitution | 273. |
| | | NIKRELTACIFPTESEARALAKER | | |
| C11orf30 | NM_020193.3:p.Arg64Ser | GDLTKEKKDLLGELSKVLSISTERHS | Missense Substitution | 274. |
| | | AEVRRAVNDERLTTIAHNMSGPNS | | |
| FER1L6 | NM_001039112.2:p.Met258Ile | PNGFPLERPWARFYVRLYKAEGLPK | Missense Substitution | 275. |
| | | INSSIMANVTKAFVGDSKDLVDPFV | | |
| AKT3 | XM_005272995.1:p.Gly265Arg | ERVFSEDRTRFYGAEIVSALDYLHS | Missense Substitution | 276. |
| | | RKIVYRDLKLENLMLDKDGHIKITD | | |
| RIC8B | XM_005269000.1:p.Thr337Met | AMKLVNMLDKLSREELLKPMGLKP | Missense Substitution | 277. |
| | | DGTIMPLEEALNQYSVIEETSSDTDG | | |
| FGF3 | NM_005247.2:p.Thr140Met | CEFVERIHELGYNTYASRLYRTVSS | Missense Substitution | 278. |
| | | MPGARRQPSAERLWYVSVNGKGRP | | |
| | | R | | |
| ALOX5 | NM_000698.3:p.Arg248Cys | VMNHWQEDLMFGYQFLNGCNPVLI | Missense Substitution | 279. |
| | | RCCTELPEKLPVTTEMVECSLERQL | | |
| | | S | | |
| F13B | XM_005244953.1:p.Ser372Leu | NLHSKIYYNGDKVTYACKSGYLLH | Missense Substitution | 280. |
| | | GLNEITCNRGKWTLPPECVENNENC | | |
| | | K | | |
| MPL | XM_005270874.1:p.Gly214Glu | ALQRPHSASALDQSPCAQPTMPWQ | Missense Substitution | 281. |
| | | DEPKQTSPSREASALTAEGGSCLISG | | |
| CUL3 | NM_003590.4:p.Tyr29His | LSKGTGSRKDTKMRIRAFPMTMDE | Missense Substitution | 282. |
| | | KHVNSIWDLLKNAIQEIQRKNNSGL | | |
| | | S | | |
| EPHA5 | XM_005265653.1:p.Thr301Asn | CSAEGEWLVPIGKCMCKAGYEEKN | Missense Substitution | 283. |
| | | GNCQAPSPVTNVKKGKIAKNSISLS | | |
| | | W | | |
| MUTYH | NM_001128425.1:p.Gln138Lys | WRRRAEDEMDLDRRAYAVWVSEV | Missense Substitution | 284. |
| | | MLKQTQVATVINYYTGWMQKWPT | | |
| | | LQDL | | |
| IDH2 | XM_005254894.1:p.Arg42Gly | VFREPIICKNIPRLVPGWTKPITIGGH | Missense Substitution | 285. |
| | | AHGDQYKATDFVADRAGTFKMVF | | |
| BRAF | NM_004333.4:p.Val600Glu | RDLKSNNIFLHEDLTVKIGDFGLATE | Missense Substitution | 286. |
| | | KSRWSGSHQFEQLSGSILWMAPEV | | |
| KMT2A | XM_005271554.1:p.Arg442Gln | ISSRIIKTPRRFIEDEDYDPPIKIAQLE | Missense Substitution | 287. |
| | | STPNSRFSAPSCGSSEKSSAAS | | |
| CDK4 | NM_000075.3:p.Arg24Cys | GGMATSRYEPVAEIGVGAYGTVYK | Missense Substitution | 288. |
| | | ACDPHSGHFVALKSVRVPNGGGGG | | |
| | | GG | | |
| GNAS | NM_000516.4:p.Ala102Val | PQAARSNSDGEKATKVQDIKNNLK | Missense Substitution | 289. |
| | | EVIETIVAAMSNLVPPVELANPENQF | | |
| FRS2 | NM_006654.4:p.Arg219Met | HTYVNTTGVQEERKNRTSVHVPLE | Missense Substitution | 290. |
| | | AMVSNAESSTPKEEPSSIEDRDPQIL | | |
| ETV7 | XM_005249174.1:p.Arg96Leu | SLPCTAEHGFEMNGRALCILTKDDF | Missense Substitution | 291. |
| | | LHRAPSSEVTGPSQMDTRRGHLLQP | | |
| HIST1HIC | NM_005319.3:p.Ala18Val | GGGGGGGGMSETAPAAPAAAPPAE | Missense Substitution | 292. |
| | | KVPVKKKAAKKAGGTPRKASGPPV | | |
| | | SE | | |
| TAS2R4 | NM_016944.1:p.Ser171Asn | LYITLSQASPFPELVTTRNNTSFNINE | Missense Substitution | 293. |
| | | GILSLVVSLVLSSSLQFIINVTS | | |
| LOC285556 | XM_373030.7:p.Ala747Val | SSRHSEAGSEYTVVSMSDAGGEGSV | Missense Substitution | 294. |
| | | VGSKSPVFKASTPRERNAGPGRNFT | | |
| CHEK1 | NM_001244846.1:p.Ile437Val | KETCEKLGYQWKKSCMNQGDGLE | Missense Substitution | 295. |
| | | FKRHFLKIKGKLIDIVSSQKVWLPAT | | |
| | | G | | |
| ERBB4 | NM_005235.2:p.Arg106His | REVTGYVLVALNQFRYLPLENLRII | Missense Substitution | 296. |
| | | HGTKLYEDRYALAIFLNYRKDGNF | | |
| | | G | | |
| CHD4 | XM_005253668.1:p.Asp315Asn | KLGGFGSKRKRSSSEDDDLDVESDF | Missense Substitution | 297. |
| | | NDASINSYSVSDGSTSRSSRSRKKL | | |
| BTK | XM_005262181.1:p.Ala3Thr | GGGGGGGGGGGGGGGGGGGGGG | Missense Substitution | 298. |
| | | GMATVILESIFLKRSQQKKKTSPLNF | | |
| | | KK | | |
| OLFM3 | NM_058170.2:p.Pro138Ser | DDRKTLMTKHFQELKEKMDELLPLI | Missense Substitution | 299. |
| | | SVLEQYKTDAKLITQFKEEIRNLSA | | |
| GRIN2A | XM_005255269.1:p.Glu25Lys | GMLKIMQDYDWHVFSLVTTIFPGY | Missense Substitution | 300. |
| | | RKFISFVKTTVDNSFVGWDMQNVIT | | |
| | | L | | |
| ARID1B | NM_020732.3:p.Gly572Arg | GGSYGPPGPQRYPIGIQGRTPGAMA | Missense Substitution | 301. |
| | | RMQYPQQQDSGDATWKETFWLMP | | |
| | | PQ | | |
| LMAN1 | NM_005570.3:p.Asp226Tyr | VRAKITYYQNTLTVMINNGFTPDKN | Missense Substitution | 302. |
| | | YYEFCAKVENMIIPAQGHFGISAAT | | |
| KDM5A | NM_001042603.1:p.Arg266Gln | IFGAGPKVVGLAMGTKDKEDEVTR | Missense Substitution | 303. |
| | | RQKVTNRSDAFNMQMRQRKGTLS | | |
| | | VNF | | |
| CARD11 | XM_005249891.1:p.Ala1046Val | ETIIYSREKNPNAFECIAPANIEAVV | Missense Substitution | 304. |
| | | AKNKHCLLEAGIGCTRDLIKSNIY | | |
| SPTBN2 | XM_005274193.1:p.Arg1480Cys | GAGEVERTSRAVEEKFRALCQPMR | Missense Substitution | 305. |
| | | ECCRRLQASREQHQFHRDVEDEILW | | |
| | | V | | |
| CD79A | NM_001783.3:p.Arg107Gln | GPGEDPNGTLIIQNVNKSHGGIYVC | Missense Substitution | 306. |
| | | QVQEGNESYQQSCGTYLRVRQPPPR | | |
| GNA13 | NM_006572.4:p.Asn91Lys | KQMRIIHGQDFDQRAREEFRPTIYSK | Missense Substitution | 307. |
| | | VIKGMRVLVDAREKLHIPWGDNSN | | |
| CD79B | NM_000626.2:p.Glu102Lys | LWKQEMDENPQQLKLEKGRMEES | Missense Substitution | 308. |
| | | QNKSLATLTIQGIRFEDNGIYFCQQK | | |
| | | C | | |
| FAS | NM_000043.4:p.Glu261Lys | IAGVMTLSQVKGFVRKNGVNEAKI | Missense Substitution | 309. |
| | | DKIKNDNVQDTAEQKVQLLRNWH | | |
| | | QLH | | |
| CSRNP1 | XM_005265403.1:p.Ser18Leu | GGGGGGGGMTGLLKRKFDQLDED | Missense Substitution | 310. |
| | | NSLVSSSSSSSGCQSRSCSPSSSVSRA | | |
| BTG1 | NM_001731.2:p.Alal7Asp | GGGGGGGGGMHPFYTRAATMIGEI | Missense Substitution | 311. |
| | | ADAVSFISKFLRTKGLTSERQLQTFS | | |
| CCDC108 | XM_005246442.1:p.Arg200Trp | KFFFTVIPQPIFLSPGITLTLPIVFWPL | Missense Substitution | 312. |
| | | EAKEYMDQLWFEKAEGMFCVGL | | |
| RASGRF1 | NM_001145648.1:p.Leu29Met | GIRLNDGHVASLGLLARKDGTRKG | Missense Substitution | 313. |
| | | YMSKRSSDNTKWQTKWFALLQNLL | | |
| | | FY | | |
| EGFR | NM_201282.1:p.Pro589Leu | PQAMNITCTGRGPDNCIQCAHYIDG | Missense Substitution | 314. |
| | | LHCVKTCPAGVMGENNTLVWKYA | | |
| | | DA | | |
| JAK1 | NM_002227.2:p.Ser703Ile | FMHRKSDVLTTPWKFKVAKQLASA | Missense Substitution | 315. |
| | | LIYLEDKDLVHGNVCTKNLLLAREG | | |
| | | I | | |
| LYN | NM_001111097.2:p.Trp78Leu | YDGIHPDDLSFKKGEKMKVLEEHG | Missense Substitution | 316. |
| | | ELWKAKSLLTKKEGFIPSNYVAKLN | | |
| | | T | | |
| CDKN2A | NM_000077.4:p.Ala102Glu | TLTRPVHDAAREGFLDTLVVLHRA | Missense Substitution | 317. |
| | | GERLDVRDAWGRLPVDLAEELGHR | | |
| | | DV | | |
| PCK1 | NM_002591.3:p.Val368Ile | TNPNAIKTIQKNTIFTNVAETSDGGI | Missense Substitution | 318. |
| | | YWEGIDEPLASGVTITSWKNKEWS | | |
| HSD3B1 | NM_000862.2:p.Ala339Val | PFNRHIVTLSNSVFTFSYKKAQRDL | Missense Substitution | 319. |
| | | VYKPLYSWEEAKQKTVEWVGSLV | | |
| | | DR | | |
| DICER1 | NM_001195573.1:p.Glu1608Asp | LCSLGLKVLPVIKRTDREKALCPTR | Missense Substitution | 320. |
| | | DNFNSQQKNLSVSCAAASVASSRSS | | |
| TJAP1 | NM_001146017.1:p.Thr432Ile | EEDLLVSWQRAFVDRTPPPAAVAQ | Missense Substitution | 321. |
| | | RIAFGRDALPELQRHFAHSPADRDE | | |
| | | V | | |
| ETV1 | NM_001163151.1:p.Pro141Ser | SIPDSSYPMDHRFRRQLSEPCNSFPS | Missense Substitution | 322. |
| | | LPTMPREGRPMYQRQMSEPNIPFP | | |
| MET | NM_001127500.1:p.Arg412His | QHFYGPNHEHCFNRTLLRNSSGCEA | Missense Substitution | 323. |
| | | HRDEYRTEFTTALQRVDLFMGQFSE | | |
| BAP1 | XM_005265508.1:p.Arg234His | VIMERIGLATAGIKYEARLHVLKVN | Missense Substitution | 324. |
| | | HQTVLEALQQLIRVTQPELIQTHKS | | |
| C2CD5 | XM_005253533.1:p.Arg181Gln | YRAVIIHGFVEELVVNEDPEYQWID | Missense Substitution | 325. |
| | | QIRTPRASNEARQRLISLMSGELQR | | |
| AP1G1 | XM_005255824.1:p.Arg224Cys | TEMCERSPDMLAHFRKNEKLVPQL | Missense Substitution | 326. |
| | | VCILKNLIMSGYSPEHDVSGISDPFL | | |
| AURKB | NM_004217.3:p.Arg284His | IGVLCYELLVGNPPFESASHNETYR | Missense Substitution | 327. |
| | | HIVKVDLKFPASVPMGAQDLISKLL | | |
| CDKN2C | NM_001262.2:p.Leu24Val | GGMAEPWGNELASAAARGDLEQLT | Missense Substitution | 328. |
| | | SVLQNNVNVNAQNGFGRTALQVM | | |
| | | KLG | | |
| KRAS | NM_004985.3:p.Gly13Pro | GGGGGGGGGGGGGMTEYKLVVVG | Missense Substitution | 329. |
| | | AGPVGKSALTIQLIQNHFVDEYDPTI | | |
| | | E | | |
| HSP90AA1 | NM_005348.3:p.Pro179His | HNDDEQYAWESSAGGSFTVRTDTG | Missense Substitution | 330. |
| | | EHMGRGTKVILHLKEDQTEYLEERR | | |
| | | I | | |
| JAK2 | NM_004972.3:p.Arg115Ile | ETERIWYPPNHVFHIDESTRHNVLYI | Missense Substitution | 331. |
| | | IRFYFPRWYCSGSNRAYRHGISRG | | |
| BRAF | NM_004333.4:p.Ser467Leu | GRRDSSDDWEIPDGQITVGQRIGSG | Missense Substitution | 332. |
| | | LFGTVYKGKWHGDVAVKMLNVTA | | |
| | | PT | | |
| ERBB2 | NM_004448.2:p.Ala1039Thr | MGDLVDAEEYLVPQQGFFCPDPAP | Missense Substitution | 333. |
| | | GTGGMVHHRHRSSSTRSGGGDLTL | | |
| | | GL | | |
| MYC | XM_005250922.1:p.Pro57Ser | YQQQQQSELQPPAPSEDIWKKFELL | Missense Substitution | 334. |
| | | STPPLSPSRRSGLCSPSYVAVTPFS | | |
| KIAA1279 | NM_015634.3:p.Met603Ile | LEHYKFIVDYCEKHPEAAQEIEVEL | Missense Substitution | 335. |
| | | ELSKEIVSLLPTKMERFRTKMALTG | | |
| RIMS1 | NM_001168410.1:p.Ser537Ile | TNCLRPDTSLHSPERERHSRKSERSII | Missense Substitution | 336. |
| | | QKQTRKGTASDAERMHRQRSPTQ | | |
| SLC26A2 | NM_000112.3:p.Arg496His | IAPLFYSLQKSVLGVITIVNLRGALH | Missense Substitution | 337. |
| | | KFRDLPKMWSISRMDTVIWFVTML | | |
| IKBKE | XM_005273356.1:p.Val365Ile | HKQTSVAPRHQEYLFEGHLCVLEPS | Missense Substitution | 338. |
| | | ISAQHIAHTTASSPLTLFSTAIPKG | | |
| FGFR1 | NM_023106.2:p.Arg357Leu | LRRQVTVSADSSASMNSGVLLVRPS | Missense Substitution | 339. |
| | | LLSSSGTPMLAGVSEYELPEDPRWE | | |
| CCL14 | NM_032963.3:p.Alal7Thr | GGGGGGGGGMKISVAAIPFFLLITIT | Missense Substitution | 340. |
| | | LGTKTESSSRGPYHPSECCFTYTT | | |
| FGF6 | NM_020996.1:p.Arg62Cys | PSPAGTRANNTLLDSRGWGTLLSRS | Missense Substitution | 341. |
| | | CAGLAGEIAGVNWESGYLVGIKRQ | | |
| | | R | | |
| FUBP1 | NM_003902.3:p.Ala503Asp | GTPMGPYNPAPYNPGPPGPAPHGPP | Missense Substitution | 342. |
| | | DPYAPQGWGNAYPHWQQQAPPDP | | |
| | | AK | | |
| FANCC | NM_001243744.1:p.Phe219Leu | TDVDPLVEALLICHGREPQEILQPEL | Missense Substitution | 343. |
| | | FEAVNEAILLKKISLPMSAVVCLW | | |
| C19orf18 | NM_152474.4:p.Pro25Ser | GMDKVQSGFLILFLFLMECQLHLCL | Missense Substitution | 344. |
| | | SYADGLHPTGNITGLPGSKRSQPPR | | |
| ZNF473 | XM_005258717.1:p.Glu395Lys | KIFRHSSLLIEHQALHAGEEPYKCNK | Missense Substitution | 345. |
| | | RGKSFRHNSTLKIHQRVHSGEKPY | | |
| IKZF1 | NM_001220770.1:p.Pro18His | GGGGGGGGMDADEGQDMSQVSGK | Missense Substitution | 346. |
| | | ESHPVSDTPDEGDEPMPIPEDLSTTS | | |
| | | G | | |
| CFI | NM_000204.3:p.Pro451Thr | YQNDIALIEMKKDGNKKDCELPRSI | Missense Substitution | 347. |
| | | TACVPWSPYLFQPNDTCIVSGWGRE | | |
| MLH1 | XM_005265164.1:p.Arg144Cys | VKSTTSLTSSSTSGSSDKVYAHQMV | Missense Substitution | 348. |
| | | CTDSREQKLDAFLQPLSKPLSSQPQ | | |

TABLE 2
Missense Mutations - Insertions and Deletions

| | | | | SEQ |
|---|---|---|---|---|
| | | | Peptide | ID |
| Gene | HGVS Variant ID | Peptide Sequence | Class | NO: |
| CDKN2A | NM_000077.4:p.Leu32_Leu37del | SSMEPSADWLATAAARGRVEEVRALPN | Deletion | 349. |
| | | APNSYGRRPIQVMMMGSARVAEL | | |
| CDKN2A | NM_000077.4:p.Leu63_Pro70del | PNAPNSYGRRPIQVMMMGSARVAELNC | Deletion | 350. |
| | | ADPATLTRPVHDAAREGFLDTLV | | |
| GJB1 | NM_000166.5:p.Ile30_Phe31dup | YTLLSGVNRHSTAIGRVWLSVIFIFIFRIM | Insertion | 351. |
| | | VLVVAAESVWGDEKSSFICN | | |
| KRT10 | NM_000421.3:p.Ser508_Gly512del | SGGGHGGGHGGSSGGGYGGGSSGGGYG | Deletion | 352. |
| | | GGSSSGGHGGSSSGGYGGGSSGG | | |
| KRT10 | NM_000421.3:p.Ser562delinsTerLeu | YGGGSSGGGSSSGGGYGGGSGLRRRIRR | Insertion | 353. |
| | ArgArgArgIleArgArgArgGlnPro | RQPSGGHKSSSSGSVGESSSKG | | |
| KRT2 | NM_000423.2:p.Phe108_Ser109insGly | AGGFGGRGGGFGGGSSFGGGSGFGGGS | Insertion | 354. |
| | GlyGlySerGlyPhe | GFSGGGFGGGGFGGGRFGGFGGP | | |
| KRT2 | NM_000423.2:p.Phe96_Gly97insTrpArg | ISVAGGGGGFGAAGGFGGRGGGFWRRQ | Insertion | 355. |
| | ArgGlnArgLeu | RLGGGSSFGGGSGFSGGGFGGGG | | |
| SMPD1 | NM_000543.4:p.Val36_Leu39del | SCPRSGREQGQDGTAGAPGLLWMGLAL | Deletion | 356. |
| | | ALALALALSDSRVLWAPAEAHPL | | |
| HNF1A | NM_000545.5:p.Gln250_Gly255del | SKEERETLVEECNRAECIQRGVSPSSNLV | Deletion | 357. |
| | | TEVRVYNWFANRRKEEAFRHK | | |
| RPL29 | NM_000992.2:p.Ala129_Lys130dup | KRARARIAKGLRLCRPKAKAKAKAKAK | Insertion | 358. |
| | | DQTKAQAAAPASVPAQAPKRTQA | | |
| RPL29 | NM_000992.2:p.Lys122_Ala123insGly | YIAHPKLGKRARARIAKGLRLCRPKGQA | Insertion | 359. |
| | Gln | KAKAKAKDQTKAQAAAPASVPA | | |
| KRTAP5-5 | NM_001001480.2:p.Gly44_Ala53del | SGCGGCGSGCGGCGSGCGGCGSGCGGC | Deletion | 360. |
| | | GGCGSGCCVPVCCCKPMCCCVPA | | |
| HDGFRP2 | NM_001001520.1:p.Leu585_Glu589del | KVNKAGMEKEKAEEKLAGEELAGEEAP | Deletion | 361. |
| | | QEKAEDKPSTDLSAPVNGEATSQ | | |
| TSPYL6 | NM_001003937.2:p.Gly194_Pro195del | EEMDVAEENRAIDEVNREAGPGPGPLNV | Deletion | 362. |
| | | GLHLNPLESIQLELDSVNAEAD | | |
| OR5H6 | NM_001005479.1:p.Val124_Thr126del | INFLAKSKMISLSECMVQFFSLVTTECFLL | Deletion | 363. |
| | | ATMAYDRYVAICKALLYPVI | | |
| KRTAP5-1 | NM_001005922.1:p.Ser111_Gly120del | KGGCGSCGGSKGGCGSCGGSKGGCGSG | Deletion | 364. |
| | | CGGCGSSCCVPVCCCKPMCCCVP | | |
| PRR25 | NM_001013638.1:p.Ala27_Ala28del | ARTDQKPPCRGGCWGQPGHPNTGGAHP | Deletion | 365. |
| | | TYHPMGHRPRTCILLRGDQTTGG | | |
| TMEM82 | NM_001013641.2:p.Thr307delinsArgSer | GRWLDLLGILVSLLGELWCLVGVRRSLL | Insertion | 366. |
| | | DLCQIQDFPSQRPPVSTPSQPL | | |
| VRK3 | NM_001025778.1:p.Ser77_Thr83del | PPTPKSSPQKTRKSPQVTRGSPQKTRQSP | Deletion | 367. |
| | | QTLKRSRVTTSLEALPTGTVL | | |
| RPL14 | NM_001034996.2:p.Ala159_Lys160ins | LKASPKKAPGTKGTAAAAAAAAAALLL | Insertion | 368. |
| | LeuLeuLeu | KVPAKKITAASKKAPAQKVPAQK | | |
| RPL14 | NM_001034996.2:p.Ala159_Lys160ins | KASPKKAPGTKGTAAAAAAAAAALLLL | Insertion | 369. |
| | LeuLeuLeuLeuLeu | LKVPAKKITAASKKAPAQKVPAQ | | |
| SRA1 | NM_001035235.3:p.Val110delinsAla | RSPPVGSGPASGVEPTSFPVESEAAMME | Insertion | 370. |
| | Met | DVLRPLEQALEDCRGHTRKQVC | | |
| MESP2 | NM_001039958.1:p.Gly187_Gln190del | CPLCPDRGPAEAQTQAEGQGQGQGQGQ | Deletion | 371. |
| | | GQGQGQGQGQGQGRRPGLVSAVL | | |
| MESP2 | NM_001039958.1:p.Gly187_Gln194del | CPLCPDRGPAEAQTQAEGQGQGQGQGQ | Deletion | 372. |
| | | GQGQGQGQGRRPGLVSAVLAEAS | | |
| TCERG1 | NM_001040006.1:p.Ala217_Gln222del | QAQAQAQAQAQAQAQAQAQAQAQAQA | Deletion | 373. |
| | | QAQAQAQAQAQAQAQAQAQVQAQV | | |
| SSTR1 | NM_001049.2:p.Thr390delinsSerSer | VDYYATALKSRAYSVEDFQPENLESGGV | Insertion | 374. |
| | GluProGlyProArgArgAla | FRNGTCTSRITSSEPGPRRALG | | |
| LNP1 | NM_001085451.1:p.Gln74_Glu75insGlu | IPSSDCHPRRHSHEDQEFRCRSSDRLPRR | Insertion | 375. |
| | PheArgCysArgSerSerAspArgLeuProArg | NSHEDQEFRCRSHVRDYRKYS | | |
| | ArgAsnSerHisGluAspGln | | | |
| LNP1 | NM_001085451.1:p.Gln74_Glu75insGlu | IPSSDCHPRRHSHEDQEFRCRSSDRLPRRP | Insertion | 376. |
| | PheArgCysArgSerSerAspArgLeuProArg | SHEDQEFRCRSHVRDYRKYS | | |
| | ArgProSerHisGluAspGln | | | |
| LNP1 | NM_001085451.1:p.Gln74_Glu75insGlu | IPSSDCHPRRHSHEDQEFRCRSSDRLPRT | Insertion | 377. |
| | PheArgCysArgSerSerAspArgLeuProArg | HSHEDQEFRCRSHVRDYRKYS | | |
| | ThrHisSerHisGluAspGln | | | |
| SPRR3 | NM_001097589.1:p.Cys74_Gly81del | GNTKIPEPGCTKVPEPGCTKVPEPGCTKV | Deletion | 378. |
| | | PEPGCTKVPEPGCTKVPEPGY | | |
| TMEM184A | NM_001097620.1:p.Pro389_Ser390ins | HNFSPAYQHYTQQATHEAPRPGTHPRSG | Insertion | 379. |
| | Arg | GSGGSRKSRSLEKRMLIPSEDL | | |
| IRF5 | NM_001098627.2:p.Arg175_Leu184del | LQRMLPSLSLTEDVKWPPTLQPPTLQPPV | Deletion | 380. |
| | | VLGPPAPDPSPLAPPPGNPAG | | |
| IRF5 | NM_001098629.1:p.Arg191_Leu200del | GPHMTPYSLLKEDVKWPPTLQPPTLQPP | Deletion | 381. |
| | | VVLGPPAPDPSPLAPPPGNPAG | | |
| REPIN1 | NM_001099696.2:p.Gly358_Pro361del | PAGPQESAAEPTPAVPLKPAQEPPPEHPQ | Deletion | 382. |
| | | DPIEAPPSLYSCDDCGRSFRL | | |
| ZNF219 | NM_001102454.1:p.Gln233_Pro234del | SLTAHGAPERPLAATSAAPPPQPQPPPQP | Deletion | 383. |
| | | EPRSVPQPEPEPEPEREATPT | | |
| GIGYF2 | NM_001103148.1:p.Gln1210_Pro1211 | LERRAKQKANQQRQQQQLPQQQQQQSP | Insertion | 384. |
| | insSer | PQQPPQQPQQQDSVWGMNHSTLH | | |
| NAA16 | NM_001110798.1:p.Asn57_Gly60delins | FCKMILSNPKFAEHGETLAMKGLTLKKK | Deletion | 385. |
| | Lys | EEAYEFVRKGLRNDVKSHVCWH | | |
| NAA16 | NM_001110798.1:p.Leu56_Asn57insLys | CKMILSNPKFAEHGETLAMKGLTLKKKN | Insertion | 386. |
| | LysLys | CLGKKEEAYEFVRKGLRNDVKS | | |
| ATXN1 | NM_001128164.1:p.Gln208_Gln210del | NMGSLSQTPGHKAEQQQQQQQQQQQH | Deletion | 387. |
| | | QQQQQQQQQQQQQQHLSRAPGLIT | | |
| ZNF717 | NM_001128223.1:p.Asn650_Cys652del | GKTFRQKSNLSTHQGTHTGEKPYVCGKT | Deletion | 388. |
| | | FHRKSFLTIHQRTHTGKNRMDV | | |
| ZNF717 | NM_001128223.1:p.Glu818_Arg820del | KTFYDKTVLTIHQRTHTGEKPFECKKTFS | Deletion | 389. |
| | | QKSKLFVHHRTHTGEKPFRCN | | |
| CALHM3 | NM_001129742.1:p.Pro277_Glu278ins | QARGLRRGNAGRRLELPAVPEPPRSAGA | Insertion | 390. |
| | ArgSerAlaTerAlaPro | PEGLDSGSGKAHLRAISSREQV | | |
| MEF2A | NM_001130926.1:p.Gln420_Pro421del | EPISPPRDRMTPSGFQQQQQQQQQQPPPP | Deletion | 391. |
| | | QPQPQPPQPQPRQEMGRSPVD | | |
| PRDM6 | NM_001136239.1:p.Ser95_Cys96insPro | RPASLSSASSTPASSSTSASSASSPPPCAA | Insertion | 392. |
| | ProPro | AAAAAALAGLSALPVSQLPV | | |
| APLP2 | NM_001142277.1:p.Glu226_Glu227del | VCCPQTKIIGSVSKEEEEEDEEEEEDEEED | Deletion | 393. |
| | | YDVYKSEFPTEADLEDFTEA | | |
| GOLGA6L6 | NM_001145004.1:p.Gln622_Ile635del | EEKRQEQEEKMWKQEEKIREQEEKIREQ | Deletion | 394. |
| | | EEMTQEQEEKMGEQEEKMCEQE | | |
| GOLGA6L6 | NM_001145004.1:p.Glu563_Glu569del | EKIREQEEMWREEEKMHEQEKIWEEDK | Deletion | 395. |
| | | MWRQEEKIREQEEKVWRQEEKIR | | |
| TMEM247 | NM_001145051.2:p.Arg129_Gln130ins | ELEKVRMEFELTRLKYLHEKNQRQRERQ | Insertion | 396. |
| | GluArg | HEVVMEQLQRERQHEVVMEQLQ | | |
| RBMXL3 | NM_001145346.1:p.Arg404_Asn405ins | DRYGEEGCYEEYRGRSPDAHSGGRRPTP | Insertion | 397. |
| | ArgProThrPro | NSSSNSYGQSHHYGGEGRYEEY | | |
| RBMXL3 | NM_001145346.1:p.Arg404_Asn405ins | RYGEEGCYEEYRGRSPDAHSGGRRPTPT | Insertion | 398. |
| | ArgProThrProThr | NSSSNSYGQSHHYGGEGRYEEY | | |
| RBMXL3 | NM_001145346.1:p.Tyr392_Arg393ins | GRSSSSNGYSRSDRYGEEGCYEEYTPTA | Insertion | 399. |
| | ThrProThrAla | RGRSPDAHSGGRNSSSNSYGQS | | |
| FAM71E2 | NM_001145402.1:p.Gln778_Glu785del | VVVREQPESHTWVKEGKRPWGEMKEPP | Deletion | 400. |
| | | WDPKGPPKVPFRSKPTSASLKRE | | |
| ZNF880 | NM_001145434.1:p.Asn306delinsSer | HLANHHRIHTGEKPYKCNECGKVFSYRN | Insertion | 401. |
| | Tyr | AHLARHQKIHSGEKPYKCKECG | | |
| C6orf132 | NM_001164446.1:p.Glu979_Phe981del | LPQGHPLPKSFSSPPSPSNKREEEEVNFEV | Deletion | 402. |
| | insVal | IPPPPEFSNDPEPPAPALQY | | |
| ATXN3 | NM_001164774.1:p.Gly78_Gly79insSer | AEGGVTSEDYRTFLQTAAKAATAAAAA | Insertion | 403. |
| | SerSerSerSerSerSerSerArg | AAGSSSSSSSSRGPIRTEFTSMG | | |
| ATXN3 | NM_001164774.1:p.Thr70_Ala71insSer | MRMAEGGVTSEDYRTFLQTAAKAATSS | Insertion | 404. |
| | SerSerSerSerArg | SSSRAAAAAAAGGPIRTEFTSMG | | |
| ATXN3 | NM_001164776.1:p.Gly93_Gly94insSer | TFLQQPSGNMDDSGFFSIQTAAKAATAA | Insertion | 405. |
| | SerSerSerSer | AAAAAGSSSSSGPIRTEFTSMG | | |
| ATXN3 | NM_001164776.1:p.Thr85_Ala86insSer | FLQQPSGNMDDSGFFSIQTAAKAATSSSS | Insertion | 406. |
| | SerSerSerSerArg | SRAAAAAAAGGPIRTEFTSMG | | |
| ATXN3 | NM_001164776.1:p.Thr85_Ala86insSer | LQQPSGNMDDSGFFSIQTAAKAATSSSSS | Insertion | 407. |
| | SerSerSerSerSerArg | SRAAAAAAAGGPIRTEFTSMG | | |
| ATXN3 | NM_001164777.1:p.Gly38_Gly39insSer | HEKQPSGNMDDSGFFSIQTAAKAATAAA | Insertion | 408. |
| | SerSerSerSerSer | AAAAGSSSSSSGPIRTEFTSMG | | |
| ATXN3 | NM_001164777.1:p.Gly38_Gly39insSer | EKQPSGNMDDSGFFSIQTAAKAATAAAA | Insertion | 409. |
| | SerSerSerSerSerSer | AAAGSSSSSSSGPIRTEFTSMG | | |
| ATXN3 | NM_001164777.1:p.Gly38_Gly39insSer | QPSGNMDDSGFFSIQTAAKAATAAAAAA | Insertion | 410. |
| | SerSerSerSerSerSerSerArg | AGSSSSSSSSRGPIRTEFTSMG | | |
| ATXN3 | NM_001164777.1:p.Thr30_Ala3linsSer | HEKQPSGNMDDSGFFSIQTAAKAATSSSS | Insertion | 411. |
| | SerSerSerSerArg | SRAAAAAAAGGPIRTEFTSMG | | |
| ATXN3 | NM_001164777.1:p.Thr30_Ala3linsSer | EKQPSGNMDDSGFFSIQTAAKAATSSSSS | Insertion | 412. |
| | SerSerSerSerSerArg | SRAAAAAAAGGPIRTEFTSMG | | |
| ATXN3 | NM_001164778.1:p.Gly144_Gly145ins | SFICNYKEHWFTVRKLGKQTAAKAATA | Insertion | 413. |
| | SerSerSerSerSer | AAAAAAGSSSSSGPIRTEFTSMG | | |
| ATXN3 | NM_001164778.1:p.Gly144_Gly145ins | FICNYKEHWFTVRKLGKQTAAKAATAA | Insertion | 414. |
| | SerSerSerSerSerSer | AAAAAGSSSSSSGPIRTEFTSMG | | |
| ATXN3 | NM_001164778.1:p.Gly144_Gly145ins | ICNYKEHWFTVRKLGKQTAAKAATAAA | Insertion | 415. |
| | SerSerSerSerSerSerSer | AAAAGSSSSSSSGPIRTEFTSMG | | |
| ATXN3 | NM_001164778.1:p.Gly144_Gly145ins | NYKEHWFTVRKLGKQTAAKAATAAAA | Insertion | 416. |
| | SerSerSerSerSerSerSerSerArg | AAAGSSSSSSSSRGPIRTEFTSMG | | |
| ATXN3 | NM_001164778.1:p.Thr136_Alal37ins | FICNYKEHWFTVRKLGKQTAAKAATSSS | Insertion | 417. |
| | SerSerSerSerSerArg | SSRAAAAAAAGGPIRTEFTSMG | | |
| ATXN3 | NM_001164778.1:p.Thr136_Ala137ins | ICNYKEHWFTVRKLGKQTAAKAATSSSS | Insertion | 418. |
| | SerSerSerSerSerSerArg | SSRAAAAAAAGGPIRTEFTSMG | | |
| ATXN3 | NM_001164782.1:p.Gly23_Gly24insSer | GGGGGGGGGGMESIFHEKTAAKAATAA | Insertion | 419. |
| | SerSerSerSerSer | AAAAAGSSSSSSGPIRTEFTSMG | | |
| ATXN3 | NM_001164782.1:p.Gly23_Gly24insSer | GGGGGGGGGMESIFHEKTAAKAATAAA | Insertion | 420. |
| | SerSerSerSerSerSer | AAAAGSSSSSSSGPIRTEFTSMG | | |
| ATXN3 | NM_001164782.1:p.Gly23_Gly24insSer | GGGGGGGMESIFHEKTAAKAATAAAAA | Insertion | 421. |
| | SerSerSerSerSerSerSerArg | AAGSSSSSSSSRGPIRTEFTSMG | | |
| ATXN3 | NM_001164782.1:p.Thr15_Ala16insSer | GGGGGGGGGGMESIFHEKTAAKAATSSS | Insertion | 422. |
| | SerSerSerSerArg | SSRAAAAAAAGGPIRTEFTSMG | | |
| ATXN3 | NM_001164782.1:p.Thr15_Ala16insSer | GGGGGGGGGMESIFHEKTAAKAATSSSS | Insertion | 423. |
| | SerSerSerSerSerArg | SSRAAAAAAAGGPIRTEFTSMG | | |
| WDR66 | NM_001178003.1:p.Glu65_Gly66insArg | DTIAWRESQEEERKTGEEEGEEERKRRR | Insertion | 424. |
| | LysArgArgArg | GKEDKKIVMEETEEKAGEVQEK | | |
| DMKN | NM_001190349.1:p.Gly287_Gly288ins | NNGSSSGGSSSGSSSGGSSGGSSGQQQW | Insertion | 425. |
| | GlnGlnGlnTrp | GSSGNSGGSRGDSGSESSWGSS | | |
| KRTAP9-1 | NM_001190460.1:p.Pro161_Cys162ins | CQPTCCRNTSCQPTCCGSSCCQPAVGPA | Insertion | 426. |
| | AlaValGlyProAla | CCHPTCCQTICRSTCCQPSCVT | | |
| LEKR1 | NM_001193283.1:p.Glu61_Leu64delins | EFKAMEEKVKAMEKEMKFYQGSVDRD | Deletion | 427. |
| | Asp | QEKLHSLSQELEQYKIDNKSKTER | | |
| RNF212 | NM_001193318.2:p.Ser241_Gln242ins | PPATCLLCLSCLSGFRHGPWRSAGSSLGR | Insertion | 428. |
| | AlaGlySerSerLeuGlyArg | QALPSDLVAPLFVSYTVEVSI | | |
| MUC22 | NM_001198815.1:p.Thr1456_Thr1465 | EGSETTTASTAGSETTTASTAGSETNTAC | Deletion | 429. |
| | del | TTGSETSTPSSAGSETNTAFI | | |
| ZNF816 | NM_001202457.1:p.Gly185_Ala186ins | HSHLPELHMFQTKGKISNQLDKSIGCASS | Insertion | 430. |
| | Cys | ASESQRISCRLKTHISNKYGK | | |
| CA9 | NM_001216.2:p.Gly91_Pro96del | PSEEDSPREEDPPGEEDLPGEEDLPEVKP | Deletion | 431. |
| | | KSEEEGSLKLEDLPTVEAPGD | | |
| CCDC40 | NM_001243342.1:p.Asn1003_Thr1004 | RARTTRDARGHVHEQHGTRAGTCTNKG | Deletion | 432. |
| | delinsLys | RAQARARTRDARRHVHEHRTHTA | | |
| CACNA1B | NM_001243812.1:p.Val992_Thr997del | REAESGEEPARRHRARHKAQPAHEAAEK | Deletion | 433. |
| | insAla | EATEKEAEIVEADKEKELRNHQ | | |
| KIF21B | NM_001252103.1:p.Gly304_Leu310del | RLKRTGATGERAKEGISINCGLLALGDQS | Deletion | 434. |
| | | KKVVHVPYRDSKLTRLLQDSL | | |
| CDC27 | NM_001256.3:p.Thr185delinsSerPro | KPDPDQTFKFTSLQNFSNCLPNSCSPTQV | Insertion | 435. |
| | | PNHSLSHRQPETVLTETPQDT | | |
| TDRP | NM_001256113.1:p.Ala32_Ala33del | GRVLLDEPPEEEDGLRGGPPPAAAAQAQ | Deletion | 436. |
| | | VQGASFRGWKEVTSLFNKDDEQ | | |
| CHIT1 | NM_001256125.1:p.Trp339delinsTer | VESFKTKVSYLKQKGLGGAMVGGTGRG | Insertion | 437. |
| | GlyThrGlyArgGlyHisGlyLeu | HGLALDLDDFAGFSCNQGRYPLI | | |
| NR1H2 | NM_001256647.1:p.Lys75delinsAsnArg | EASSACSTDWGVLSEEQIRKKKIRNRQQ | Insertion | 438. |
| | | QESQSQSQSPVGPQGSSSSASG | | |
| IST1 | NM_001270977.1:p.Met236_Pro237del | RGGSGGFTAPVGGPDGTVPMPMPMPMP | Deletion | 439. |
| | | SANTPFSYPLPKGPVDDINADKN | | |
| CCDC177 | NM_001271507.1:p.Ala178_Ala179del | ERIMREEKRRLFTPLSPAAAAAAAAASA | Deletion | 440. |
| | | PSAGSSSSCSSASLPASPAPRA | | |
| TP53 | NM_001276696.1:p.Thr116_Arg117del | LNKMFCQLAKTCPVQLWVDSTPPPGVR | Deletion | 441. |
| | | AMAIYKQSQHMTEVVRRCPHHER | | |
| TP53 | NM_001276696.1:p.Val118_Arg119del | KMFCQLAKTCPVQLWVDSTPPPGTRAM | Deletion | 442. |
| | | AIYKQSQHMTEVVRRCPHHERCS | | |
| TP53 | NM_001276697.1:p.Ser82_Met87delins | VVVPYEPPEVGSDCTTIHYNYMCNSLNR | Deletion | 443. |
| | Leu | RPILTIITLEDSSGNLLGRNSF | | |
| ELN | NM_001278918.1:p.Leu482_Gly490del | LGAGIPGLGVGVGVPGLGVGAGVPGFG | Deletion | 444. |
| | | AVPGALAAAKAAKYGAAVPGVLG | | |
| ELN | NM_001278939.1:p.Leu600_Gly608del | LGAGIPGLGVGVGVPGLGVGAGVPGFG | Deletion | 445. |
| | | AGADEGVRRSLSPELREGDPSSS | | |
| FOXF2 | NM_001452.1:p.Asp307delinsGluThr | TYMASCPVPAGPGGVGAAGGGGGGETY | Insertion | 446. |
| | | GPDSSSSPVPSSPAMASAIECHS | | |
| COL8A1 | NM_001850.4:p.Gly206_Pro210del | IGQKGEIGPMGIPGPQGPPGPHGLPGGPG | Deletion | 447. |
| | | LPGQPGPKGDRGPKGLPGPQG | | |
| CTNNB1 | NM_001904.3:p.Leu31_Ile35del | DLMELDMAMEPDRKAAVSHWQQQSYH | Deletion | 448. |
| | | SGATTTAPSLSGKGNPEEEDVDTS | | |
| KRT4 | NM_002272.3:p.Gly81_Thr82insSerTrp | NKSISMSVAGSRQGACFGGAGGFGSWFR | Insertion | 449. |
| | PheArg | TGGFGGGFGGSFSGKGGPGFPV | | |
| KRT4 | NM_002272.3:p.Gly87_Gly88insArg | MSVAGSRQGACFGGAGGFGTGGFGGRG | Insertion | 450. |
| | | FGGSFSGKGGPGFPVCPAGGIQE | | |
| KRT19 | NM_002276.4:p.Ala60_Gly63del | SIHGGSGGRGVSVSSARFVSSSSSGGYGG | Deletion | 451. |
| | | VLTASDGLLAGNEKLTMQNLN | | |
| MSH3 | NM_002439.4:p.Ala61_Pro63dup | SSTGAADQVDPGAAAAAAAAAAAAPAA | Insertion | 452. |
| | | PPAPPAPAFPPQLPPHIATEIDR | | |
| PRKD1 | NM_002742.2:p.Gly32_Pro33insSerGly | RPPSPLLPVAAAAAAAAAALVPGSGSGP | Insertion | 453. |
| | | GPAPFLAPVAAPVGGISFHLQI | | |
| TAF4 | NM_003185.3:p.Pro186_Gly187del | AGPAALAARAGPGPGPGPGPGPGPGKPA | Deletion | 454. |
| | | GPGAAQTLNGSAALLNSHHAAA | | |
| TSPYL1 | NM_003309.3:p.Glu174_Val175insGly | AEAEEVKTGKCATVSAAVAERESAEGV | Insertion | 455. |
| | | VKEGLAEKEVMEEQMEVEEQPPE | | |
| URI1 | NM_003796.3:p.Asp307_Asp308del | VNSQLNCSVNGSSSYHSDDDDDDDDDD | Deletion | 456. |
| | | DNIDDDDGDNDHEALGVGDNSIP | | |
| NAPA | NM_003827.3:p.Arg106delinsHisThr | ATCFVDAGNAFKKADPQEAINCLMHTG | Insertion | 457. |
| | Gly | AIEIYTDMGRFTIAAKHHISIAE | | |
| PHOX2B | NM_003924.3:p.Ala247_Ala259del | GAPGAAGPGGPGGEPGKGGAAAAAAAG | Deletion | 458. |
| | | GLAAAGGPGQGWAPGPGPITSIP | | |
| NOL3 | NM_003946.6:p.Glu170_Pro171del | VQSGTPEEPEPELEAEASKEAEPEPEPELE | Deletion | 459. |
| | | PEAEAEPEPELEPEPDPEPE | | |
| HABP2 | NM_004132.3:p.Gly199_Tyr200insCys | TCACPDQFKGKFCEIGSDDCYVGDGCYS | Insertion | 460. |
| | | YRGKMNRTVNQHACLYWNSHLL | | |
| BRAF | NM_004333.4:p.Asn486_Pro490del | QRIGSGSFGTVYKGKWHGDVAVKMLTP | Deletion | 461. |
| | | QQLQAFKNEVGVLRKTRHVNILL | | |
| CLCN2 | NM_004366.5:p.Arg645_Arg646insPro | MILLGSIERSQVVALLGAQLSPARRPRQH | Insertion | 462. |
| | | MQERRATQTSPLSDQEGPPTP | | |
| CTBS | NM_004388.2:p.Leu31_Leu33del | LRRWRLVSSPPSGVPGLALLALLALRLA | Deletion | 463. |
| | | AGTDCPCPEPELCRPIRHHPDF | | |
| EPHB6 | NM_004445.4:p.Pro165_Ser166insPro | PDSVSSWHLKRWTKVDTIAADESFPPPSS | Insertion | 464. |
| | Pro | SSSSSSSSSAAWAVGPHGAGQ | | |
| ERBB2 | NM_004448.2:p.Glu770_Ala771insHis | KIPVAIKVLRENTSPKANKEILDEHTGGA | Insertion | 465. |
| | ThrTerTer | YVMAGVGSPYVSRLLGICLTS | | |
| FOXE1 | NM_004473.3:p.Ala178_Alal79del | DLSTYPAYMHDAAAAAAAAAAAAAAIF | Deletion | 466. |
| | | PGAVPAARPPYPGAVYAGYAPPS | | |
| FOXD2 | NM_004474.3:p.His293_Ala294insArg | GYGLALPAYGAPPPGPAPHPHPHPHRPA | Insertion | 467. |
| | Pro | FAFAAAAAAAPCQLSVPPGRAA | | |
| FOXD2 | NM_004474.3:p.Pro290_His291insPro | YGYGYGLALPAYGAPPPGPAPHPHPPRH | Insertion | 468. |
| | Arg | PHAFAFAAAAAAAPCQLSVPPG | | |
| FOXD2 | NM_004474.3:p.Pro292_His293insPro | YGYGLALPAYGAPPPGPAPHPHPHPPRH | Insertion | 469. |
| | Arg | AFAFAAAAAAAPCQLSVPPGRA | | |
| POU4F2 | NM_004575.2:p.Asn52_Ala53insVal | ALHSTSPGSSAPIAPSASSPSSSSNVAGGG | Insertion | 470. |
| | | GGGGGGGGGGGGRSSSSSSS | | |
| REC8 | NM_005132.2:p.Ala230delinsGluPro | EIEGERELPEVSRRELDLLIAEEEEPILLEI | Insertion | 471. |
| | | PRLPPPAPAEVEGIGEALG | | |
| HCLS1 | NM_005335.4:p.Ala362_Glu363insGly | EEPPALPPRTLEGLQVEEEPVYEAGAGAE | Insertion | 472. |
| | AlaTerAla | PEPEPEPEPEPENDYEDVEEM | | |
| HCLS1 | NM_005335.4:p.Glu363delinsGlyAla | EPPALPPRTLEGLQVEEEPVYEAGARAGP | Insertion | 473. |
| | ArgAlaTer | EPEPEPEPEPENDYEDVEEMD | | |
| SIX3 | NM_005413.3:p.Ala38_Gly39insAlaAla | FLLPNFADSHHRSILLASSGGGNGAAAG | Insertion | 474. |
| | | GGGGAGGGSGGGNGAGGGGAGG | | |
| ARIH1 | NM_005744.3:p.Gly78_Gly79insAla | VGGERDGLLCGETGGGGGSALGPGGAG | Insertion | 475. |
| | | GGGGGGGGGGGGHEQEEDYRYE | | |
| MUC6 | NM_005961.2:p.Pro1204_Gln1209del | NCSQDEYFDHEEGVCVPCMPPTTPQLPT | Deletion | 476. |
| | | TGSRPTQVWPMTGTSTTIGLLS | | |
| SOX1 | NM_005986.2:p.Gly381_Val382dup | SMYLPAGEGGDPAAAAAAAAQSRLHSL | Insertion | 477. |
| | | PQHYQGAGAGVGVNGTVPLTHIG | | |
| SOX1 | NM_005986.2:p.Val161_Gly162del | SLAGGLLAAGAGGGGAAVAMGVGVGA | Deletion | 478. |
| | | AAVGQRLESPGGAAGGGYAHVNGW | | |
| CD7 | NM_006137.6:p.Asp172_Pro180del | PRASALPAPPTGSALPDPQTASALPAALA | Deletion | 479. |
| | | VISFLLGLGLGVACVLARTQI | | |
| | | | Class | NO: |
| PIK3CA | NM_006218.2:p.Leul13_Asn114del | RLCDLRLFQPFLKVIEPVGNREEKIREIGF | Deletion | 480. |
| | | AIGMPVCEFDMVKDPEVQDF | | |
| HEXIM1 | NM_006460.2:p.Arg323_Glu324insSer | SRMEDENNRLRLESKRLGGDDARVRSW | Insertion | 481. |
| | Trp | ELELELDRLRAENLQLLTENELH | | |
| HEXIM1 | NM_006460.2:p.Glu328_Leu329del | DENNRLRLESKRLGGDDARVRELELDRL | Deletion | 482. |
| | | RAENLQLLTENELHRQQERAPL | | |
| ZBTB33 | NM_006777.3:p.Asp194_Val195insIle | SFSLSAEDYEMKKIIVTDSDDDDDDIVIFC | Insertion | 483. |
| | | SEILPTKETLPSNNTVAQVQ | | |
| SOX21 | NM_007084.2:p.Ala160_Alal63del | EKAAAAAAAAAARVFFPQSAAAAAAAA | Deletion | 484. |
| | | AGSPYSLLDLGSKMAEISSSSSG | | |
| TCHH | NM_007113.3:p.Glu494_Glu495insGly | RKQQLKRDQEEERRERWLKLEEEGEAR | Insertion | 485. |
| | GluAlaArgAlaAla | AAERREQQERREQQLRREQEERR | | |
| NR1H2 | NM_007121.5:p.Lys172delinsAsnArg | KCKEAGMREQCVLSEEQIRKKKIRNRQQ | Insertion | 486. |
| | | QESQSQSQSPVGPQGSSSSASG | | |
| RERE | NM_012102.3:p.Glu1195_Arg1196del | AKREAEQKAREEREREKEKEKERERERE | Deletion | 487. |
| | | REAERAAKASSSAHEGRLSDPQ | | |
| CLCA4 | NM_012128.3:p.Pro879_Thr880del | TSKVSNIAQVTLFIPQANPDDIDPTPTPTP | Deletion | 488. |
| | | TPDKSHNSGVNISTLVLSVI | | |
| FBXO2 | NM_012168.5:p.Ala45_Tyr46insArg | QPEEASAEEERPEDQQEEEAAAAAARYL | Insertion | 489. |
| | | DELPEPLLLRVLAALPAAELVQ | | |
| FOXD4L1 | NM_012184.4:p.Glu75_Gly76insAla | LEQSLQPGLQVARWGGVALPREHIEAGG | Insertion | 490. |
| | | GPSDPSEFGTEFRAPPRSAAAS | | |
| PLXNB2 | NM_012401.3:p.Arg1613_Thr1614del | VWHLVRPTDEVDEGKSKRGSVKEKEKAI | Deletion | 491. |
| | | TEIYLTRLLSVKGTLQQFVDNF | | |
| PLXNB2 | NM_012401.3:p.Lys1611delinsIlePhe | RVWHLVRPTDEVDEGKSKRGSVKEIFGE | Insertion | 492. |
| | Ter | RTKAITEIYLTRLLSVKGTLQQ | | |
| ATAD2 | NM_014109.3:p.Glu278_Asp279insTer | EDDGEDEDDEDDDDDDDDDDDDDDEG | Insertion | 493. |
| | | DDEDEEDGEEENQKRYYLRQRKAT | | |
| DSPP | NM_014208.3:p.Asn1029_Ser1040del | SDSSDSSDSSDSSNSSDSSNSSDSSDSSDS | Deletion | 494. |
| | | SDSSDSSDSSNSSDSSDSSD | | |
| DSPP | NM_014208.3:p.Asn739_Ser744del | DSSDSSNSNSSDSDSSNSSDSSDSSDSSDS | Deletion | 495. |
| | | SNSSDSSDSSDSSNSSDSSD | | |
| DSPP | NM_014208.3:p.Ser1024_Asn1029del | DSSNSSDSSDSSDSSDSSNSSDSSNSSDSS | Deletion | 496. |
| | | DSSDSSDSSDSSDSSDSSDS | | |
| DSPP | NM_014208.3:p.Ser684_Asn685insVal | SSNSSDSSDSSDSSDSSSSSDSSVAVTAAN | Insertion | 497. |
| | AlaValThrAlaAla | SSDSSDSSDSSNSSESSDSS | | |
| HOXD9 | NM_014213.3:p.Gln266_Gln267insArg | PSACSDHPIPGCSLKEEEKQHSQPQRQQQ | Insertion | 498. |
| | | LDPNNPAANWIHARSTRKKRC | | |
| PCLO | NM_014510.2:p.Ile2924_Glu2925ins | LSTTKSHRTVVTMDESTSSVMTKIIREDE | Insertion | 499. |
| | Arg | KPVDLTAGRRAVCCDVVYKLP | | |
| CARD10 | NM_014550.3:p.Lys272_Glu273del | ECALLRRARGPPPGAEEKEKEKEKEPDN | Deletion | 500. |
| | | VDLVSELRAENQRLTASLRELQ | | |
| PPM1E | NM_014906.4:p.Glu44delinsAspProLys | GEFRGPCGGGEPEPEPEPEPEPEPDPKSEP | Insertion | 501. |
| | | EPEPELVEAEAAEASVEEPG | | |
| TRAK1 | NM_014965.4:p.Glu640_Gly641insArg | PQASPEEMQEPPAATEEEEEEEEEERRGS | Insertion | 502. |
| | Arg | GEGTTISPVNLAPFPEAEFWA | | |
| ACIN1 | NM_014977.3:p.Ser645_Arg646insArg | ANPRGRPKMGSRSTSESRSRSRSRSRSRS | Insertion | 503. |
| | Ser | ASSNSRKSLSPGVSRDSSTSY | | |
| THSD7A | NM_015204.2:p.Leu35_Leu36insAlaAla | GSRGAAGPRRGVLQLLPLPLPLPLLAALL | Insertion | 504. |
| | | LLLRPGAGRAAAQGEAEAPTL | | |
| CSTF2T | NM_015235.2:p.Pro219_Gly220del | KIHVTPLIPGKSQSVSVSGPGPGPGLCPGP | Deletion | 505. |
| | | NVLLNQQNPPAPQPQHLARR | | |
| FNBP4 | NM_015308.2:p.Thr58_Thr59del | PEPDTEPDSTAAVPSQPAPSAATTTAVTA | Deletion | 506. |
| | | AAASDDSPSEDEQEAVQEVPR | | |
| FNBP4 | NM_015308.2:p.Thr59_Ala60del | EPDTEPDSTAAVPSQPAPSAATTTTVTAA | Deletion | 507. |
| | | AASDDSPSEDEQEAVQEVPRV | | |
| KBTBD4 | NM_016506.5:p.Pro295_Arg296dup | SLCHQITAACKHGGDLYVVGGSIPRPRR | Insertion | 508. |
| | | MWKCNNATVDWEWCAPLPRDRL | | |
| KLRF1 | NM_016523.1:p.Lys124_Cys125delins | NKDLCASRSADQTVLCQSEWLKYQGNC | Deletion | 509. |
| | Asn | YWFSNEMKSWSDSYVYCLERKSH | | |
| PCDH12 | NM_016580.3:p.Ser1179_Ser1181dup | LSVCGRTLSLDLATSAASGMKVQGDPGG | Insertion | 510. |
| | | KTGTEGKSRGSSSSSSSSRCLG | | |
| MRPS30 | NM_016640.3:p.Pro129_Glu130del | RWYQYFTKTVFLSGLPPPPAEPEPEPEPE | Deletion | 511. |
| | | PALDLAALRAVACDCLLQEHF | | |
| FAM46A | NM_017633.2:p.Gly44_Gly45insGlyAsp | PLGGDFGGGDFGGGDFGGGDFGGGDFG | Insertion | 512. |
| | PheGlyGly | GGGSFGGHCLDYCESPTAHCNVL | | |
| ASPN | NM_017680.4:p.Asp38delinsGlyTerTyr | SAKPFFSPSHIALKNMMLKDMEDTGGYD | Insertion | 513. |
| | | DDDDDDDDDDDDEDNSLFPTRE | | |
| ASPN | NM_017680.4:p.Asp38delinsGlyTyr | SAKPFFSPSHIALKNMMLKDMEDTGYDD | Insertion | 514. |
| | | DDDDDDDDDDDEDNSLFPTREP | | |
| ASPN | NM_017680.4:p.Asp42delinsGluPhe | FFSPSHIALKNMMLKDMEDTDDDDEFDD | Insertion | 515. |
| | | DDDDDDDEDNSLFPTREPRSHF | | |
| DCP1A | NM_018403.5:p.Ala483_Ile484del | APLQSMQQNQDPEVFVQPKVLSSASPVA | Deletion | 516. |
| | | GAPLVTATTTAVSSVLLAPSVF | | |
| DCP1A | NM_018403.5:p.Ser482_Ala483del | LAPLQSMQQNQDPEVFVQPKVLSSAIPV | Deletion | 517. |
| | | AGAPLVTATTTAVSSVLLAPSV | | |
| MUC4 | NM_018406.6:p.Ser3898_Ala3913del | LPVTGLSSASTGDTTPLPVTDTSSASTDD | Deletion | 518. |
| | | TTRLPVTDVSSASTGHATPLP | | |
| MUC4 | NM_018406.6:p.Val3305_Ser3320del | SLPVTDTSSSSTGDTTPLLVTETSSASTGH | Deletion | 519. |
| | | ATPLHVTSPSSASTGDTTPV | | |
| MESP1 | NM_018670.3:p.Ala56_Arg57insAlaGlu | GRSLVSSPDSWGSTPADSPVASPAAEPRR | Insertion | 520. |
| | ProArg | PGTLRDPRAPSVGRRGARSSR | | |
| MESP1 | NM_018670.3:p.Ser50delinsLysProArg | PSDKDCGRSLVSSPDSWGSTPADKPRAG | Insertion | 521. |
| | AlaGly | PVASPARPGTLRDPRAPSVGRR | | |
| MAML3 | NM_018717.4:p.Gln505_Gln509del | KLMQQKQQQQQQQQQQQQQQQQQQQ | Deletion | 522. |
| | | QHSNQTSNWSPLGPPSSPYGAAFTA | | |
| MAML3 | NM_018717.4:p.Gln506_Gln509del | LMQQKQQQQQQQQQQQQQQQQQQQQ | Deletion | 523. |
| | | QHSNQTSNWSPLGPPSSPYGAAFTA | | |
| PCDHB10 | NM_018930.3:p.Glu684_Ala685del | HLLLVDGFSQPYLPLPEAAPAQAQADLL | Deletion | 524. |
| | | TVYLVVALASVSSLFLLSVLLF | | |
| CCDC180 | NM_020893.2:p.Glu778_Glu779insGly | EENVKGQGEKKEESEEEDEKEEEEEGRE | Insertion | 525. |
| | Arg | EKLEEEKEEKEAQEEQESLSVG | | |
| CCDC180 | NM_020893.2:p.Glu778delinsAspArg | EENVKGQGEKKEESEEEDEKEEEEDRRE | Insertion | 526. |
| | Arg | EKLEEEKEEKEAQEEQESLSVG | | |
| KRTAP5-8 | NM_021046.2:p.Lys140_Cys149del | SQSSCCKPCSCSSGCGSSCCQSSCCKPCC | Deletion | 527. |
| | | CSSGCGSSCCQSSCCKPCCSQ | | |
| NEFH | NM_021076.3:p.Glu656_Pro663del | EVKSPEKAKSPTKEEAKSPEKAKSPEKA | Deletion | 528. |
| | | KSPVKAEAKSPEKAKSPVKAEA | | |
| NEFH | NM_021076.3:p.Glu658_Glu659del | KSPEKAKSPTKEEAKSPEKAKSPEKAKSP | Deletion | 529 |
| | | EKAKSPVKAEAKSPEKAKSPV | | |
| SCAF1 | NM_021228.2:p.Arg581_Ser582del | RSRDRKPGSHASSSARRRSRSRSRSTRRR | Deletion | 530. |
| | | SRSTDRRRGGSRRSRSREKRR | | |
| PRDM12 | NM_021619.2:p.Ala359_His360insPro | SARHRPPSTALQAHSPALPAPHAHAPAL | Insertion | 531. |
| | | AAAAAAAAAAAAPHHLPAMVLG | | |
| TSKS | NM_021733.1:p.Gln244_Lys249del | LLEEKLRYLQQQLQDETPRRQEAELQEP | Deletion | 532. |
| | | EEKQEPEEKQKPEAGLSWNSLG | | |
| MAGEF1 | NM_022149.4:p.Glu153_Glu154insGly | FGFELKQFDRKHHTYILINKLKPLEGEEE | Insertion | 533. |
| | | EEDLGGDGPRLGLLMMILGLI | | |
| MAGEF1 | NM_022149.4:p.Glu153delinsGlyLys | FGFELKQFDRKHHTYILINKLKPLGKEEE | Insertion | 534. |
| | | EEDLGGDGPRLGLLMMILGLI | | |
| MAGEF1 | NM022149.4:p.Glu154_Glu155insGly | GFELKQFDRKHHTYILINKLKPLEEGEEE | Insertion | 535. |
| | | EDLGGDGPRLGLLMMILGLIY | | |
| MAGEF1 | NM_022149.4:p.Glu157_Glu158insGly | LKQFDRKHHTYILINKLKPLEEEEEGEDL | Insertion | 536. |
| | | GGDGPRLGLLMMILGLIYMRG | | |
| ADM2 | NM_024866.5:p.Arg94_Arg99del | QRGAGLAPVMGQPLRDGGRQHSGPRRT | Deletion | 537. |
| | | QAQLLRVGCVLGTCQVQNLSHRL | | |
| USP36 | NM_025090.3:p.Lys959_Lys960del | LRHSCSPMGDGDPEAMEESPRKKKKRK | Deletion | 538. |
| | | QETQRAVEEDGHLKCPRSAKPQD | | |
| CPEB4 | NM_030627.2:p.Gly676_Cys684del | IDKRVEVKPYVLDDQLCDECQGARCAN | Deletion | 539. |
| | | VTCLQYYCEYCWAAIHSRAGREF | | |
| RSPH6A | NM_030785.3:p.Glu702_Glu703insArg | IMEMSDPTVEEEQALKAAQEQALGATEE | Insertion | 540. |
| | GlyGlyGlyArgGly | RGGGRGEEEGEEEEEGEETDDG | | |
| RSPH6A | NM_030785.3:p.Thr715delinsArgGly | IMEMSDPTVEEEQALKAAQEQALGATEE | Insertion | 541. |
| | GlyGlyArgGlyAla | EEEGEEEEEGEERGGGRGADDG | | |
| PABPC3 | NM_030979.2:p.Arg272_Glu275del | AVDEMNGKELNGKQIYVGRAQKKVELK | Deletion | 542. |
| | | RTFEQMKQDRITRYQVVNLYVKN | | |
| KRTAP17- | NM_031964.1:p.Ser46_Gly50del | ECCCQPGCCGCCGSCCGCGGSGCGGSCC | Deletion | 543. |
| 1 | | GSSCCGSGCGGCGGCGGCGGGC | | |
| ZNF503 | NM_032772.4:p.Gly26_Gly27insArgArg | TAPSLSALRSSKHSGGGGGGGGGGRRRR | Insertion | 544. |
| | ArgArg | GADPAWTSALSGNSSGPGPGSS | | |
| WDR73 | NM_032856.2:p.Asp315_Gln320del | CLAISGFDGTVQVYDATSWDGTRSQVEP | Deletion | 545. |
| | | LFTHRGHIFLDGNGMDPAPLVT | | |
| DMRTB1 | NM_033067.1:p.Ala86_Pro87dup | EEQEAALCAQGPKQASGAAAAAPAPAP | Insertion | 546. |
| | | VPVPAASLRPLSPGTPSGDADPG | | |
| SEC16B | NM_033127.2:p.His279delinsArgSer | VQADVSSAGPKAPMKFYIPRSQSTHEVL | Insertion | 547. |
| | GlnSerThrHisGluValLeuHisProTyr | HPYVPVSFGPGGQLVHVGPSSP | | |
| KRTAP2-4 | NM_033184.3:p.Cys109_Cys113del | RPITCCPSSCTAVVCRPCCWATTCCQPVS | Deletion | 548. |
| | | VQSPCGQPTPCSTTCRTSSCG | | |
| KRTAP4-5 | NM_033188.3:p.Cys79delinsTrpLeuLeu | HPSCCISSCCRPYCCESSCCRPWLLPPHC | Insertion | 549. |
| | ProProHis | CQTTCCRTTCCRTTCCCPSCC | | |
| CLIC6 | NM_053277.1:p.Gly263_Ala272del | DSVDAEGRVGDSVEAGDPAGDGVEAEG | Deletion | 550. |
| | | PAGDSMDAEGPAGRARRVSGEPQ | | |
| KRT3 | NM_057088.2:p.Gly133_Gly138del | GFGGGRGMGGGFGGAGGFGGAGGFGGP | Deletion | 551. |
| | | GGFGGSGGFGGPGSLGSPGGFGP | | |
| CDKN2A | NM_058195.3:p.Ala77_Ala84del | SQRLGQQPLPRRPGHDDGQRPSGGAQLR | Deletion | 552. |
| | | RPRHSHPTRARRCPGGLPGHAG | | |
| MADCAM1 | NM_130760.2:p.Glu239_Ser240insPro | RQAIPVLHSPTSPEPPDTTSPEPPNTTSPES | Insertion | 553. |
| | ProAsnThrThrSerProGlu | PDTTSPESPDTTSQEPPDT | | |
| ADAMTS19 | NM_133638.3:p.Gly202_Pro203dup | LLRRDGRFLAPRFAVEQRPNPGPGPGPTG | Insertion | 554. |
| | | AASAPQPPAPPDAGCFYTGAV | | |
| NUS1 | NM_138459.3:p.His68_Arg70del | AASAAVLAPLGFTLRKPPAVGRNRRHPR | Deletion | 555. |
| | | GGSCLAAAHHRMRWRADGRSLE | | |
| SPATA3 | NM_139073.3:p.Pro33_Ser41del | RSEARRHRDSTSQHASSNSTSQQPSPEST | Deletion | 556. |
| | | PQQPSPESTPQHSSLETTSRQ | | |
| ARID1A | NM_139135.2:p.Gly126_Gly127insAla | NSNGNAGPRPALNNNLTEPPGGGGGAA | Insertion | 557. |
| | Ala | GSSDGVGAPPHSAAAALPPPAYG | | |
| AXDND1 | NM_144696.5:p.Glu991_Gln992del | DLEELVMTSRKESKEEKENQDEREVKEE | Deletion | 558. |
| | | EQEEEEVRSAENSSKSPKKGHG | | |
| TMIE | NM_147196.2:p.Asp122_Lys123delins | KAAKMYTDKLETVPPLNELTEVPGEEKK | Deletion | 559. |
| | Glu | KKKKKKDSVDTVAIKVEEDEKN | | |
| FAM194A | NM_152394.3:p.Val41_Glu42insGluGlu | ESEEELEEEEEEEEVEEEEEEVEEEEEEVE | Insertion | 560. |
| | GluGluGluGluVal | EEEEEVEEEEEEVVEEELVG | | |
| GGN | NM_152657.3:p.Ala499_Pro500insPro | PTAAPALPPALAADQAPAPSPAPGPGPIP | Insertion | 561. |
| | GlyProGlyProIleProGly | GPAPTVAEPSPPVSAPAPAAA | | |
| OR5P2 | NM_153444.1:p.Ser36_Gly37insHisLeu | FILLGLTDDPILRVILFMIILSHLPGNHIGN | Insertion | 562. |
| | ProGlyAsnHisIle | LSIIILIRISSQLHHPMYF | | |
| KCNG4 | NM_172347.2:p.Glu173_Leul75dup | GIEEAHLERCCLRKLLRKLEELEELEELA | Insertion | 563. |
| | | KLHREDVLRQQRETRRPASHS | | |
| LSM11 | NM_173491.2:p.Gly75_Arg76del | APCFNNVAEYESFLRTGVRGGGRGRARG | Deletion | 564. |
| | | AAAGSGVPAAPGPSGRTRRRPD | | |
| RTTN | NM_173630.3:p.Phe241_Gly242insTrp | DFPAEIFLQRPKIVQSLLSLLKLAFWGDG | Insertion | 565. |
| | | KHRLALQSVSCLQQLCMYLRN | | |
| NOP9 | NM_174913.1:p.Asp170delinsGlyArg | LQSALLQLPRLLGSAAEEEEEEEEGRNGK | Insertion | 566. |
| | Asn | DGPTETLEELVLGLAAEVCDD | | |
| NOP9 | NM_174913.1:p.Asp170delinsGlyArg | LQSALLQLPRLLGSAAEEEEEEEEGRHGK | Insertion | 567. |
| | His | DGPTETLEELVLGLAAEVCDD | | |
| NOP9 | NM_174913.1:p.Asp170delinsGlyAsn | LQSALLQLPRLLGSAAEEEEEEEEGNGK | Insertion | 568. |
| | | DGPTETLEELVLGLAAEVCDDF | | |
| NOP9 | NM_174913.1:p.Glu169_Asp170insGly | VLQSALLQLPRLLGSAAEEEEEEEEGDG | Insertion | 569. |
| | | KDGPTETLEELVLGLAAEVCDD | | |
| IL6ST | NM_175767.2:p.Tyr186_Tyr190del | KSEWATHKFADCKAKRDTPTSCTVDFV | Deletion | 570. |
| | | NIEVWVEAENALGKVTSDHINFD | | |
| FAM171B | NM_177454.3:p.Gln49delinsHisLys | LVPAAARAELSRSDLSLIQQQQQQHKQQ | Insertion | 571. |
| | | QQQQQKQLEEAEEERTEVPGAT | | |
| LCE1F | NM_178354.2:p.Ser54_Ser55insAlaLeu | KCPPKCPPVSSCCSVSSGGCCGSALGAA | Insertion | 572. |
| | GlyAlaAlaAla | ASSGGCCSSGGGGCCSSGGGGC | | |
| LCE4A | NM_178356.2:p.Ser43_Ser44insAlaLeu | YPPKCPSKCASSCPPPISSCCGSALGAAVS | Insertion | 573. |
| | GlyAlaAlaVal | SGGCGCCSSEGGGCCLSHHR | | |
| RP1L1 | NM_178857.5:p.Thr1344_Glu1345ins | VQLEETKTEEGLQEEGVQLEETKETAEG | Insertion | 574. |
| | Ala | EGQQEEEAQLEEIEETGGEGLQ | | |
| KRTAP10- | NM_181688.1:p.Val98_Pro102del | PCYQQSSCQPDCCTSSPCQQACCVPVCC | Deletion | 575. |
| 10 | | VPVCNKPVCFVPTCSESSPSCC | | |
| CPEB2 | NM_182485.2:p.Thr480_Ser481insAla | SMNPAFFPSFSPVSPHGCTGLSVPTASGG | Insertion | 576. |
| | | GGGGFGGPFSATAVPPPPPPA | | |
| FAM194B | NM_182542.2:p.Glu135_Leu140del | IEEEEYLGKEGYLEEEEYLGKEEHLGKEG | Deletion | 577. |
| | | YLEKEDYIEEVDYLGKKAYLE | | |
| TMEM37 | NM_183240.2:p.Gln69_Thr70insValTer | ICDGHWLLAEDRLFGLWHFCTTTNQVGT | Insertion | 578. |
| | | ICFRDLGQAHVPGLAVGMGLVR | | |
| TMEM37 | NM_183240.2:p.Thr70delinsMetCysPro | CDGHWLLAEDRLFGLWHFCTTTNQMCP | Insertion | 579. |
| | | ICFRDLGQAHVPGLAVGMGLVRS | | |
| KRTAP10-6 | NM_198688.2:p.Pro45_Cys46insLeuLeu | GSCDSCSDSWQVDDCPESCCEPPLLRPQ | Insertion | 580. |
| | ArgProGln | CCAPAPCLSLVCTPVSRVSSPC | | |
| KRTAP10-7 | NM_198689.2:p.Ser50_Pro54del | CDSCSDSWQVDDCPESCCEPPCCAPAPC | Deletion | 581. |
| | | LSLVCTPVSRVSSPCCPVTCEP | | |
| BMP2K | NM_198892.1:p.Gln482delinsHisSer | HQQQQQQQQQQQQQQQQQQQQQQHSN | Insertion | 582. |
| | AsnLys | KQQQQHHHHHHHHLLQDAYMQQYQ | | |
| LURAPIL | NM_203403.1:p.Gly49_Gly50insAlaAla | RSLRGEEPVPRERDRDPCGGSGGGAAAG | Insertion | 583. |
| | Ala | GGGGGCSSSSSYCSFPPSLSSS | | |
| FAM174B | NM_207446.2:p.Ser69_Ser70del | RPPPGPGPGNTTRFGSGAAGGSGSSNSSG | Deletion | 584. |
| | | DALVTRISILLRDLPTLKAAV | | |
| MUC3A | XM_001725354.6:p.Ser206_Ser207ins | GTSAMTSSPSTTTARETPIVTVTPSASVSA | Insertion | 585. |
| | Ala | TDTTFHTTISSTTRTTERTP | | |
| MUC3A | XM_001725354.6:p.Ser206_Ser207ins | GTSAMTSSPSTTTARETPIVTVTPSPSVSA | Insertion | 586. |
| | Pro | TDTTFHTTISSTTRTTERTP | | |
| MUC3A | XM_001725354.6:p.Ser207_Val208ins | TSAMTSSPSTTTARETPIVTVTPSSPVSAT | Insertion | 587. |
| | Pro | DTTFHTTISSTTRTTERTPL | | |
| GOLGA6L2 | XM_002343322.4:p.Met526delinsIle | EQEKMQEQEEKIWEQEEKIRDQEEIEWG | Insertion | 588. |
| | Glu | QEKKMWQEEKMWGQEEMREKEE | | |
| MUC19 | XM_003846356.2:p.Leu3304_Pro3313 | RTTRPSAGITGTNGLSAEVTGTTGPSAGV | Deletion | 589. |
| | del | TRTTGLSAGETGTTGLSPGVT | | |
| LOC | XM_003959939.2:p.Asp272delinsAla | ERARWHQRMSKMSQEICTLKKEKQANM | Insertion | 590. |
| 101059918 | Asn | RWVEQLEWSLSKLKNQTAEPLPP | | |
| CDK11A | XM_005244784.1:p.Lys115_Glul16dup | SRKEKVHHRKDEKRKEKWKHARVKEKE | Insertion | 591. |
| | | REHERRKRHREEQDKARREWERQ | | |
| CELF3 | XM_005244860.1:p.Gln346_Gln347ins | PQPPALVAQQPPPPPQQQQQQQQQQAQQ | Insertion | 592. |
| | Ala | QQQREGPDGCNIFIYHLPQEFT | | |
| ZNF683 | XM_005245831.1:p.Leu243_Trp250del | HLLMLPQDPSYPTMAMPSLLMMVNEET | Deletion | 593. |
| | | LLPYPGAFQASGQALPSQARNPG | | |
| UBXN11 | XM_005246030.1:p.Pro454_Gly455del | VPKAALLLRARRAPKSSLKFSPGPCPGPG | Deletion | 594. |
| | | PSPGPGPGPSPGPGPGPSPCP | | |
| SP9 | XM_005246214.1:p.Ala463_Ala467del | SNLETPRSESPDLILHDSGVSAARAAAAA | Deletion | 595. |
| | | AAAAAASAGGKEAASGPNDSG | | |
| NCL | XM_005246588.1:p.Asp184_Asp185del | MKAAAAAPASEDEDDEDDEDDEDDDEE | Deletion | 596. |
| | | DDSEEEAMETTPAKGKKAAKVVP | | |
| KIAA2018 | XM_005247209.1:p.Gln1406_Gln1408 | HLQALQQHVPAQGVSHLHSNHLYIKQQ | Deletion | 597. |
| | del | QQQQQQQQQQQQAGQLRERHHLY | | |
| KIAA2018 | XM_005247209.1:p.Lys1405_Gln1406 | HLQALQQHVPAQGVSHLHSNHLYIKAA | Insertion | 598. |
| | insAlaAla | QQQQQQQQQQQQQQQQQAGQLRE | | |
| TF | XM_005247730.1:p.Glu399_Asn402del | EGCAPGSKKDSSLCKLCMGSGLNLCKEG | Deletion | 599. |
| | | YYGYTGAFRCLVEKGDVAFVKH | | |
| HTT | XM_005247964.1:p.Gln36_Gln37del | FESLKSFQQQQQQQQQQQQQQQP | Deletion | 600. |
| | | PPPPPPPPPPQLPQPPPQAQPLL | | |
| HTT | XM_005247964.1:p.Pro40_Pro4linsArg | FQQQQQQQQQQQQQQQQQQQQQPPRR | Insertion | 601. |
| | ArgArg | RPPPPPPPPPQLPQPPPQAQPLLP | | |
| ANKS1A | XM_005248964.1:p.Gly41_Gly42insAla | PAVEKLLSGKRLSSGFGGGGGGGSGAAG | Insertion | 602. |
| | Ala | GGGGSGGGGGGLGSSSHPLSSL | | |
| PRRC2A | XM_005249392.1:p.Pro512_Pro515del | AEKLKRLDEKFGAPDKRLKAEPAAPSTP | Deletion | 603. |
| | | APPPAVPKELPAPPAPPPASAP | | |
| FERD3L | XM_005249656.1:p.Glu79delinsGlyLys | ARFEEGDPEEEECEVDQGDGEEEEGKEE | Insertion | 604. |
| | | RGRGVSLLGRPKRKRVITYAQR | | |
| VKORCIL1 | XM_005250159.1:p.Val162_Phe163ins | LEAAAATQAGLTPDRLHPNSLKPLSIQFI | Insertion | 605. |
| | Leu | LQQVLFIIIIIIIIHNRHFPG | | |
| PRUNE2 | XM_005251754.1:p.Gln1013_Ser1014 | FAKEEGFESKDGNSTAEETDIPPQVTAKS | Insertion | 606. |
| | insValThrAlaLys | LQQSSRNRISSGPGNLDMWAS | | |
| PRUNE2 | XM_005251754.1:p.Gln1013delinsPro | FAKEEGFESKDGNSTAEETDIPPPVPAKS | Insertion | 607. |
| | ValProAlaLys | LQQSSRNRISSGPGNLDMWAS | | |
| PRUNE2 | XM_005251754.1:p.Gln1013delinsPro | FAKEEGFESKDGNSTAEETDIPPPVTAKS | Insertion | 608. |
| | ValThrAlaLys | LQQSSRNRISSGPGNLDMWAS | | |
| PRUNE2 | XM_005251754.1:p.Leu2714_Thr2718 | EEASGPVSQSQKSKSRGRAGPDAVTHDN | Deletion | 609. |
| | del | EWEMLSPQPVQKNMIPDTEMEE | | |
| PRUNE2 | XM_005251754.1:p.Ser1018_Ser1019 | GFESKDGNSTAEETDIPPQSLQQSLQQSS | Insertion | 610. |
| | insLeuGlnGlnSer | RNRISSGPGNLDMWASPHTDN | | |
| PHF2 | XM_005252051.1:p.Pro989_Ala990ins | PSTSTSISAGTTSTSTTPASTTPASTTPAST | Insertion | 611. |
| | AlaSerThrThrPro | TPASTSTASSQASQEGSSP | | |
| PHF2 | XM_005252051.1:p.Thr988_Pro989ins | SPSTSTSISAGTTSTSTTPASTTLPPPHPAS | Insertion | 612. |
| | LeuProProProHis | TTPASTSTASSQASQEGSS | | |
| SKIDA1 | XM_005252452.1:p.Glu427_Glu428dup | SSSNSVSSEEEEEEGEEEEEEEEEEEEGGS | Insertion | 613. |
| | | GASDSSEVSSEEEDSSTESD | | |
| FAM208B | XM_005252476.1:p.Ser1621_Ala1623 | SSEHDEGLSFSGKVQCYGRELNQPAKCT | Deletion | 614. |
| | del | GDFSPSPEKLVKSGNPLQPVSI | | |
| DNHD1 | XM_005252803.1:p.Arg1290_Ser1291 | VTKEEPKCQKPRSLAAIEEAALLRPYCRS | Insertion | 615. |
| | insProTyrCysArg | PLFSILNGLHLHNLRGLLCAL | | |
| FNBP4 | XM_005252834.1:p.Thr58_Thr59del | PEPDTEPDSTAAVPSQPAPSAATTTAVTA | Deletion | 616. |
| | | AAASDDSPSEGKDEQEAVQEV | | |
| FNBP4 | XM_005252834.1:p.Thr59_Ala60del | EPDTEPDSTAAVPSQPAPSAATTTTVTAA | Deletion | 617. |
| | | AASDDSPSEGKDEQEAVQEVP | | |
| PIK3C2G | XM_005253393.1:p.Ser128_Pro129del | KAPAIGFSPSVLPKPQNTNKECSWGTIGK | Deletion | 618. |
| | insThr | HHGADDSRFSILAPSFTSLDK | | |
| PLCZ1 | XM_005253521.1:p.Glu341_Glu344del | RGKVEEWEEEVADGEEEEEEEEEEEDKF | Deletion | 619. |
| | | KESEVLESVLGDNQDKETGVKK | | |
| PLCZ1 | XM_005253521.1:p.Glu343_Asp345del | KVEEWEEEVADGEEEEEEEEEEEEEKFK | Deletion | 620. |
| | | ESEVLESVLGDNQDKETGVKKL | | |
| EP400 | XM_005253589.1:p.Leu2681_Arg2682 | VPQVSQATGVQLPGKTITPAHFQLLSRQ | Insertion | 621. |
| | insSer | QQQQQQQQQQQQQQQQQQQQQQ | | |
| NCOR2 | XM_005253650.1:p.Gly1848delinsGlu | STTTVEHAPIWRPGTEQSSGSSGEQRRGG | Insertion | 622. |
| | GlnArgArg | GSSSRPASHSHAHQHSPISPR | | |
| NCOR2 | XM_005253650.1:p.Gly1849delinsGlu | STTTVEHAPIWRPGTEQSSGSSGGERGGS | Insertion | 623. |
| | rAg | SSRPASHSHAHQHSPISPRTQ | | |
| NCOR2 | XM_005253650.1:p.Ser1843delinsArg | KSILTSTTTVEHAPIWRPGTEQSRRQPGSS | Insertion | 624. |
| | ArgGlnPro | GGGGGSSSRPASHSHAHQHS | | |
| AKAP3 | XM_005253664.1:p.Ser700_Gly70lins | LCVIIAKSCDASLAELGDDKSGRGQAGR | Insertion | 625. |
| | GlyArgTerGlnAlaGlyArgTerGlnAla | GQAGDASRLTSAFPDSLYECLP | | |
| VSIG10 | XM_005253907.1:p.Glu472_Glu473del | SRGQNMDDVMVLVDSEEEEEEEEEEDA | Deletion | 626. |
| | | AVGEQEGAREREELPKEIPKQDH | | |
| RFX7 | XM_005254603.1:p.Pro954_Thr955del | TSSTHFYHPIHSNGTPIHTPTPTPTPTPTPT | Deletion | 627. |
| | | PTPTSEMIAGSQSLSRESP | | |
| SLC28A1 | XM_005254995.1:p.Leu140_Lys14lins | TCVVLTFLGHRLLKRLLGPKLRRFLFKPQ | Insertion | 628. |
| | Phe | GHPRLLLWFKRGLALAAFLGL | | |
| NOL3 | XM_005256218.1:p.Arg128_Ser129del | RCNPGPRRSQSQSWKLRPLKRLNRSQSQ | Deletion | 629. |
| | | SWNPRLKQNQSRNWSQNRTQSP | | |
| BPTF | XM_005257159.1:p.Pro2720_Pro2721 | LAQATAVAAPCPPVTPAPPAPPAPQPPPP | Insertion | 630. |
| | insGlnProPro | SPPPPPAVQHTGLLSTPTLPA | | |
| BPTF | XM_005257159.1:p.Pro2721_Pro2722 | AQATAVAAPCPPVTPAPPAPPAPPPLPPSP | Insertion | 631. |
| | insProLeuPro | PPPPAVQHTGLLSTPTLPAA | | |
| BPTF | XM_005257159.1:p.Pro2721_Pro2722 | AQATAVAAPCPPVTPAPPAPPAPPPPPPSP | Insertion | 632. |
| | insProProPro | PPPPAVQHTGLLSTPTLPAA | | |
| HEATR6 | XM_005257570.1:p.Leu433_Gln436del | VNVRVSSLTLLGAIVSTHAPLPEVQQPCS | Deletion | 633. |
| | | SGLGNSNSATPHLSPPDWWKK | | |
| KRTAP4-5 | XM_005257750.1:p.Cys64delinsTrpLeu | KPQCCQSVCCRPYCCESSCCRPWLLPPH | Insertion | 634. |
| | LeuProProHis | CCQTTCCRTTCCRTTCCCPSCC | | |
| HSPBP1 | XM_005258702.1:p.Gly28_Gly30dup | SRGSRLPLALPPASQGCSSGGGGGGGGG | Insertion | 635. |
| | | SSAGGSGNSRPPRNLQGLLQMA | | |
| ZNF283 | XM_005258786.1:p.Glu114_Met115del | LESKTYETKKIFSENDIFEINFSQWKDKSK | Deletion | 636. |
| | | TLGLEASIFRNNWKCKSIFE | | |
| TSKS | XM_005259131.1:p.Gln44_Lys49del | GLQEKLRYLQQQLQDETPRRQEAELQEP | Deletion | 637. |
| | | EEKQEPEEKQKPEAGLSWNSLG | | |
| SMARCA4 | XM_005260035.1:p.Gly237_Pro238del | GMQQQMPTLPPPSVSATGPGPGPGPGPG | Deletion | 638. |
| | | PGPAPPNYSRPHGMGGPNMPPP | | |
| TP53TG5 | XM_005260395.1:p.Asn81_Glu82delins | SLLSVPKILRISSGENSACNKTKQNKEFQ | Deletion | 639. |
| | Lys | EIGCSEKELKSKKLESTGDPK | | |
| SYNJ1 | XM_005261081.1:p.Val775_Leu776ins | VQTSPVPTPDPKRLIQLPSATQSNVNTLSS | Insertion | 640. |
| | AsnThr | VSCMPTMPPIPARSQSQENM | | |
| COL18A1 | XM_005261181.1:p.Pro947_Pro949del | GERGEPGGGGFFGSSLPGPPGPPGPRGYP | Deletion | 641. |
| | | GIPGPKGESIRGQPGPPGPQG | | |
| CDC42EP1 | XM_005261318.1:p.Pro255_Ala261del | NPPAPTANPTGPAANPPATTANPPAPAAT | Deletion | 642. |
| | | PTGPAANPPAPAASSTPHGHC | | |
| NEFH | XM_005261619.1:p.Glu622_Pro629del | EAKSPEKAKSPVKEEAKSPEKAKSPEKA | Deletion | 643. |
| | | KSPVKAEAKSPEKAKSPVKAEA | | |
| BAIAP2L2 | XM_005261751.1:p.Ile441_Arg454del | ELPSRSYPLRGSHSLDDLLDRPGNSTPSR | Deletion | 644. |
| | | VPSRAPSPAPPPLPSSRRSSM | | |
| BAIAP2L2 | XM_005261751.1:p.Pro407_Met408ins | ALEEGPVNPMTPVTPMTSMTSMSPHDT | Insertion | 645. |
| | HisAspThr | MTPMNPGNELPSRSYPLRGSHSL | | |
| AR | XM_005262263.1:p.Gln79_Gln80del | LLLLQQQQQQQQQQQQQQQQQQQQQE | Deletion | 646. |
| | | TSPRQQQQQQGEDGSPQAHRRGPT | | |
| AR | XM_005262263.1:p.Gln79_Gln80dup | LLQQQQQQQQQQQQQQQQQQQQQQQQ | Insertion | 647. |
| | | QETSPRQQQQQQGEDGSPQAHRRG | | |
| ADRA2B | XM_005263890.1:p.Glu299_Glu301dup | LPNSGQGQKEGVCGASPEDEAEEEEEEE | Insertion | 648. |
| | | EEEEECEPQAVPVSPASACSPP | | |
| ZNF2 | XM_005264018.1:p.Leu76_Arg77delins | NGRMGTEKQSPSGETRKKSLSRDKGWR | Deletion | 649. |
| | Trp | RRSALSREILTKERHQECSDCGK | | |
| C2orf81 | XM_005264303.1:p.Ser350delinsTrp | CIASGVLVSYPSVGGATRPSAWRRHPPL | Insertion | 650. |
| | ArgArgHisProProLeuArgAla | RACQQQRAGHSDVRLSAHHHRM | | |
| TTLL3 | XM_005265048.1:p.Asp124delinsGlu | LVPGTHAQGASDTHPLGPPHTPVLETPSP | Insertion | 651. |
| | Thr | QDGFPVLWRGSSKASHMNRLR | | |
| KIAA1211 | XM_005265752.1:p.Arg308_Glu309ins | APREEQQRSLEAPGWEDAERRERGSGGS | Insertion | 652. |
| | GlySerGlyGlySerGly | GEERERLEAEEERRRLQAQAQA | | |
| KIAA1211 | XM_005265752.1:p.Asp302_Ala303ins | PLEAERAPREEQQRSLEAPGWEDGSGGS | Insertion | 653. |
| | GlySerGlyGlySerGly | GAERREREERERLEAEEERRRL | | |
| SLU7 | XM_005265793.1:p.Arg268_Arg273del | HNSEDEDEDKYADDIDMPGQNFDSKNL | Deletion | 654. |
| | | RIREDIAKYLRNLDPNSAYYDPK | | |
| HAVCR1 | XM_005265882.1:p.Met158_Pro162del | PIVTTVPTVTTVRTSTTVPTTTTVPTTTVP | Deletion | 655. |
| | | TTMSIPTTTTVLTTMTVSTT | | |
| FNDC1 | XM_005267165.1:p.Thr1404_Thr1409 | TTTTTPLPTTTTPRPTTATTRRTTTRRPTT | Deletion | 656. |
| | del | TVRTTTRTTTTTTPTPTTPI | | |
| FOXA1 | XM_005267575.1:p.Asp216_Phe221del | FNDCFVKVARSPDKPGKGSYWTLHPEN | Deletion | 657. |
| | | GCYLRRQKRFKCEKQPGAGGGGG | | |
| FOXA1 | XM_005267575.1:p.Phe221Asn223del | VKVARSPDKPGKGSYWTLHPDSGNMYG | Deletion | 658. |
| | insTyr | CYLRRQKRFKCEKQPGAGGGGGS | | |
| ATXN3 | XM_005267655.1:p.Gln295delinsPro | TNLTSEELRKRREAYFEKHQQPAAAAAA | Insertion | 659. |
| | AlaAlaAlaAlaAlaAlaGlu | EQQQQQQQGDLSGQSSHPCERP | | |
| ATXN3 | XM_005267655.1:p.Gln295delinsPro | GTNLTSEELRKRREAYFEKHQQPAAAAA | Insertion | 660. |
| | AlaAlaAlaAlaAlaGlu | EQQQQQQQGDLSGQSSHPCERP | | |
| ATXN3 | XM_005267655.1:p.Gly303_Asp304ins | LRKRREAYFEKHQQQQQQQQQQGAAA | Insertion | 661. |
| | AlaAlaAlaAlaAla | AADLSGQSSHPCERPATSSGALGS | | |
| ATXN3 | XM_005267655.1:p.Gly303_Asp304ins | LRKRREAYFEKHQQQQQQQQQQGAAA | Insertion | 662. |
| | AlaAlaAlaAlaAlaAla | AAADLSGQSSHPCERPATSSGALG | | |
| ATXN3 | XM_005267655.1:p.Gly303_Asp304ins | RKRREAYFEKHQQQQQQQQQQGAAAA | Insertion | 663. |
| | AlaAlaAlaAlaAlaAlaAla | AAADLSGQSSHPCERPATSSGALG | | |
| ATXN3 | XM_005267665.1:p.Gln192delinsPro | LTSEELRKRREAYFEKQQQKQQPAAAAA | Insertion | 664. |
| | AlaAlaAlaAlaAlaGlu | EQQQQQQQGDLSGQSSHPCERP | | |
| ATXN3 | XM_005267665.1:p.Gly200_Asp201ins | RREAYFEKQQQKQQQQQQQQQQGAAA | Insertion | 665. |
| | AlaAlaAlaAlaAla | AADLSGQSSHPCERPATSSGALGS | | |
| ATXN3 | XM_005267665.1:p.Gly200_Asp201ins | RREAYFEKQQQKQQQQQQQQQGAAA | Insertion | 666. |
| | AlaAlaAlaAlaAlaAla | AAADLSGQSSHPCERPATSSGALG | | |
| ATXN3 | XM_005267665.1:p.Gly200_Asp201ins | REAYFEKQQQKQQQQQQQQQQGAAAA | Insertion | 667. |
| | AlaAlaAlaAlaAlaAlaAla | AAADLSGQSSHPCERPATSSGALG | | |
| DDHD1 | XM_005268102.1:p.Gly111_Gly112dup | NYDFSSAESGSSLRYYSEGESGGGGGGSS | Insertion | 668. |
| | | LSLHPPQQPPLVPTNSGGGGA | | |
| DDHD1 | XM_005268102.1:p.Ser108delinsLys | LSDENYDFSSAESGSSLRYYSEGEKRRGG | Insertion | 669. |
| | ArgArg | GGSSLSLHPPQQPPLVPTNSG | | |
| DDHD1 | XM_005268106.1:p.Gly111_Gly112dup | NYDFSSAESGSSLRYYSEGESGGGGGGSS | Insertion | 670. |
| | | LSLHPPQQPPLVPTNSGGGLY | | |
| GOLGA6L2 | XM_005268282.1:p.Met253delinsIle | EQEKMQEQEEKIWEQEEKIRDQEEIEWG | Insertion | 671. |
| | Glu | QEKKMWRQEKMREQEDVETGGE | | |
| STAC3 | XM_005268764.1:p.Glu31_Glu32del | EPQANGEAVGAGGGPIYYIYEEEEEEEEE | Deletion | 672. |
| | | EPPPEPPKLVNDKPHKFKDHF | | |
| FGD6 | XM_005269024.1:p.Thr1223_Glu1234 | LDEADSENKEEVSPLGSKAPIWIPDKFTL | Deletion | 673. |
| | delinsLys | TWRRHHCRACGKIVCQACSSN | | |
| METTL25 | XM_005269184.1:p.Gln249_Val252del | WKLCHAQSRLDVNGLALKMAKERKVK | Deletion | 674. |
| | | NKADTEEVFNNSPTNQEKMPTSAI | | |
| MUC4 | XM_005269321.1:p.Thr113_Alal14ins | DTLTQMMTSTLFSSPSVHNVMETCYAGD | Insertion | 675. |
| | CysTyrAlaGlyAsp | APPDEMTTSFPSSVTNTLMMTS | | |
| MUC4 | XM_005269328.1:p.His792_Gln807del | LFLLPAFPQLPQVTPPLFLSPTLPQLPQMT | Deletion | 676. |
| | | PPVFLSPTFPRHPQDMPPLF | | |
| MUC4 | XM_005269328.1:p.Thr940_Val955del | PALPQHPQVTPPLFLSPALPQHPQVTPPLF | Deletion | 677. |
| | | MSPALPQHPEVTPALFLSPM | | |
| MUC4 | XM_005269328.1:p.Tyr280_Gln295del | LFLSPTLPHHPQVTPPLFLSPRLPQHPQVT | Deletion | 678. |
| | | PPLFMSPALPQHPQVTPPLC | | |
| C10orf71 | XM_005269479.1:p.His702delinsGlnHis | SVSQETEPEREAGLQNTHTHTHTHTHTQ | Insertion | 679. |
| | ThrHisThr | HTHTDHQHILSLFRSIKSRRQG | | |
| FAM149B1 | XM_005269747.1:p.Pro411_Ser413del | QSFLLDTQYRRSCAVEYPHQARPGRGSA | Deletion | 680. |
| | | GPQLHGSTKSQSGGRRTRQGPG | | |
| AFAP1L2 | XM_005270234.1:p.Leu110_Gly11lins | PSQHSSAPQKSLPDLPPPKMRILTLGGQIS | Insertion | 681. |
| | Gly | GAQSFSPDGTHLTGTEFLGG | | |
| KIF20B | XM_005270290.1:p.Glu1104_Lys1105 | ELEQQIEKLQAEVKGYKDENNRLKEKEK | Insertion | 682. |
| | insLysGlu | EHKNQDDLLKEKETLIQQLKEE | | |
| KIF20B | XM_005270290.1:p.Lys1103_Glu1104 | EELEQQIEKLQAEVKGYKDENNRLKKKE | Insertion | 683. |
| | insLysLys | KEHKNQDDLLKEKETLIQQLKE | | |
| GPRIN2 | XM_005270332.1:p.Arg242_Ala243ins | EQLATTTCHALPPAALLCGMREVRRWG | Insertion | 684. |
| | ArgTrpGly | AGGCCHALPATGILAFPKLVASV | | |
| CC2D1B | XM_005270593.1:p.Ala233_Arg234del | LPEPRASSSKESPSPSVREQLALLEKLQY | Deletion | 685. |
| | | QRAALQAKRSQDLEQAKAYLR | | |
| OVGP1 | XM_005270905.1:p.Thr495_Pro496ins | VGYQSVTPGEKTLTPVGHQSVTHWTEDP | Insertion | 686. |
| | HisTrpThrGluAspProAsp | DPVSHQSVSPGGTTMTPVHFQT | | |
| OVGP1 | XM_005270905.1:p.Thr495_Val502del | TLTSVGYQSVTPGEKTLTPVGHQSVSPG | Deletion | 687. |
| | | GTTMTPVHFQTETLRQNTVAPR | | |
| EGFR | XM_005271746.1:p.Glu701_Ala705del | GAFGTVYKGLWIPEGEKVKIPVAIKTSPK | Deletion | 688. |
| | | ANKEILDEAYVMASVDNPHVC | | |
| EGFR | XM_005271746.1:p.Val720_Met721ins | VAIKELREATSPKANKEILDEAYVWPAM | Insertion | 689. |
| | TrpProAla | ASVDNPHVCRLLGICLTSTVQL | | |
| CEL | XM_005272155.1:p.Pro596_Pro606del | PVPPTGDSGAPPVTPTGDSETAPVPPTGD | Deletion | 690. |
| | | SEAAPVPPTDDSKEAQMPAVI | | |
| PRRC2B | XM_005272227.1:p.Glu987_Asp992del | IKQELGEESTRLAKEKEQSPTAEKDASLA | Deletion | 691. |
| | | NSSTTTLEDKGPGHATFGREA | | |
| PRRC2B | XM_005272227.1:p.Met772_Arg773del | EGYMALQSKGYPLPHPKSSDTLAMDSVR | Deletion | 692. |
| | insSer | NESSFSASLGRAGGVSAQRDLF | | |
| SGK223 | XM_005272369.1:p.Pro1162_Ala1163 | GIIHRDLCLENLLLVHCTLQAGPGPRPAP | Insertion | 693. |
| | insArgPro | APAPAPAAAAPPCSSAAPPAG | | |
| ITPKB | XM_005273120.1:p.Ser93_Ser95del | EPRSPGGWRSGRRRLNSSSGSGSGSSVSS | Deletion | 694. |
| | | PSWAGRLRGDRQQVVAAGTLS | | |
| ENAH | XM_005273182.1:p.Arg207_Glu208ins | ERLERERLERERLERERLEQEQLERAERQ | Insertion | 695. |
| | Ala | ERERQERLERQERLERQERLE | | |
| ENAH | XM_005273182.1:p.Glu231_Leu236del | ERERQERERQERLERQERLERQERLDRE | Deletion | 696. |
| | | RQERQERERLERLERERQERER | | |
| FMN2 | XM_005273200.1:p.Gly945_Ala955del | PGAGIPPPPPLPGAGILPLPPLPGAAIPPPP | Deletion | 697. |
| | | PLPGAGIPLPPPLPGAGIP | | |

TABLE 3
Nonsense Mutations (Stop/Start Gain or Loss)

| | | | Variant | SEQ ID |
|---|---|---|---|---|
| Gene | HGVS Variant ID | Peptide Sequence | Class | NO: |
| CHD6 | NM_032221.4: p.Arg1301* | FEGSPARELDVPLPDIDYMEIPVDWWDA | Stop Gain | 1753. |
| | | EADKSLLIGVFKHGYERYNAMG | | |
| SMAD2 | NM_001135937.2: p.Arg57* | TPPVVKRLLGWKKSAGGSGGAGGGEQN | Stop Gain | 1754. |
| | | GQEEKWCEKAVKSLVKKLKKTGG | | |
| OR11G2 | NM_001005503.1: p.Arg160* | YVTSTVPSMLANFLSDTKIISFSGCFLQFY | Stop Gain | 1755. |
| | | FFFSLGSTECFFLAVMAFDG | | |
| SKA3 | NM_145061.5: p.Ser318* | IIQQLEKSDAEYTNSPLVPTFCTPGLKIPS | Stop Gain | 698. |
| | | TKNSIALVSTNYPLSKTNSG | | |
| ZP2 | XM_005255562.1: p.Ser763* | PDSPLCSVTCPVSSRHRRATGATEAEKM | Stop Gain | 699. |
| | | TVSLPGPILLLSDDSSFRGVGG | | |
| IFT88 | XM_005266555.1: p.Glu796* | LRALPGTNEPYESSSNKEIDASYVDPLGP | Stop Gain | 700. |
| | | QIERPKTAAKKRIDEDDFADG | | |
| B4GALNT3 | NM_173593.3: p.Gln862* | QVTGDPHFNIVITDYSSEDMDVEMALKR | Stop Gain | 701. |
| | | SKLRSYQYVKLSGNFERSAGLG | | |
| EP300 | NM_001429.3: p.Ser281* | GQTGLRGPQPLKMGMMNNPNPYGSPYT | Stop Gain | 702. |
| | | QNPGQQIGASGLGLQIQTKTVLG | | |
| BCHE | NM_000055.2: p.Lys341* | LRNKDPQEILLNEAFVVPYGTPLSVNFGP | Stop Gain | 703. |
| | | TVDGDFLTDMPDILLELGQFG | | |
| ZNF93 | NM_031218.3: p.Gln146* | KVILRRYEKRGHGNLQLIKRCESVDECK | Stop Gain | 704. |
| | | VHTGGYNGLNQCSTTTQSKVFG | | |
| PLXNC1 | NM_005761.2: p.Glu1235* | EDWLLWQVPEFSTVALNVVFEKIPENES | Stop Gain | 705. |
| | | ADVCRNISVNVLDCDTIGQAKG | | |
| NKX2-2 | NM_002509.3: p.Arg129* | TEGLQYSLHGLAAGAPPQDSSSKSPEPSA | Stop Gain | 706. |
| | | DESPDNDKETPGGGGDAGKKG | | |
| MAP3K19 | XM_005263796.1: p.Glu120* | QDWQPRTEEFSTSHMKYSGRSIKFLLPPL | Stop Gain | 707. |
| | | SLLPTRSGVLTIPQNHKFPKG | | |
| NF1 | XM_005257986.1: p.Arg192* | FSLSCNNFNAVFSRISTRLQELTVCSEDN | Stop Gain | 708. |
| | | VDVHDIELLQYINVDCAKLKG | | |
| LGALS2 | NM_006498.2: p.Ser16* | GGGGGGGGGGGGGGGGGGGGGGGGGG | Stop Gain | 709. |
| | | GGGGGGGGMTGELEVKNMDMKPGG | | |
| NUP210L | NM_207308.2: p.Arg1051* | VTVRVLGSSKRPFQNKYFRNMELKLQLA | Stop Gain | 710. |
| | | SAIVTLTPMEQQDEYSENYILG | | |
| UNC5C | NM_003728.3: p.Arg278* | ARLSDTANYTCVAKNIVAKRKSTTATVI | Stop Gain | 711. |
| | | VYVNGGWSTWTEWSVCNSRCGG | | |
| SUCO | XM_005245250.1: p.Met1? | GGGGGGGGGGGGGGGGGGGGGGGGG | Start Loss | 712. |
| | | MDSRRDWEREKRILEGKLQLPKALA | | |
| MAP3K1 | XM_005248519.1: p.Arg111* | HEWLERRNRRGPVVVKPIPVKGDGSEM | Stop Gain | 713. |
| | | NHLAAESPGEVQASAASPASKGG | | |
| RAD54B | NM_001205263.1: p.Glu432* | VVRFCLQGLLENSPHLICIGALKKLCNHP | Stop Gain | 714. |
| | | CLLFNSIKEKECSSTCDKNEG | | |
| KIF11 | NM_004523.3: p.Glu460* | KLTVQEEQIVELIEKIGAVEEELNRVTELF | Stop Gain | 715. |
| | | MDNKNELDQCKSDLQNKTQG | | |
| SPINK5 | NM_006846.3: p.Arg853* | GNKCTMCKEKLEREAAEKKKKEDEDRS | Stop Gain | 716. |
| | | NTGERSNTGERSNDKEDLCREFG | | |
| TIMMDC1 | NM_016589.3: p.Arg160* | EIYHNRFDAVQSAHRAATRGFIRYGWR | Stop Gain | 717. |
| | | WGWRTAVFVTIFNTVNTSLNVYG | | |
| CHRNE | NM_000080.3: p.Tyr262* | VIRRHHGGATDGPGETDVIYSLIIRRKPLF | Stop Gain | 718. |
| | | YVINIIVPCVLISGLVLLAG | | |
| PEG10 | NM_015068.3: p.Arg45* | GGGGGMTERRRDELSEEINNLREKVMK | Stop Gain | 719. |
| | | QSEENNNLQSQVQKLTEENTTLG | | |
| AUH | XM_005252071.1: p.Arg160* | LACDIRVAASSAKMGLVETKLAIIPGGGG | Stop Gain | 720. |
| | | TQRLPRAIGMSLAKELIFSAG | | |
| SLC6A15 | NM_001146335.2: p.Arg589* | DSSGNLASVTYKRGRVLKEPVNLEGDDT | Stop Gain | 721. |
| | | SLIHGKIPSEMPSPNFGKNIYG | | |
| DNAH8 | NM_001206927.1: p.Arg3027* | YELMPSFDFLAEKLQFYQRQFNEIIRGTS | Stop Gain | 722. |
| | | LDLVFFKDAMTHLIKISRIIG | | |
| CCR7 | NM_001838.3: p.Arg209* | QAVSAHRHRARVLLISKLSCVGIWILATV | Stop Gain | 723. |
| | | LSIPELLYSDLQRSSSEQAMG | | |
| SLC2A3 | XM_005253472.1: p.Cys13* | GGGGGGGGGGGGGGGGGGGGGGGGGG | Stop Gain | 724. |
| | | GGGGGGGGGGGMLIVNLLAVTGGG | | |
| C2orf69 | NM_153689.5: p.Gly262* | DSIASNCRSSPSHTTNGCQGEKVRTCEKS | Stop Gain | 725. |
| | | DESAMSFYPPSLNDASFTLIG | | |
| RBBP6 | NM_006910.4: p.Glu1230* | KRKMEPDTEKMDRTPEKDKISLSAPAKK | Stop Gain | 726. |
| | | IKLNRETGKKIGSTENISNTKG | | |
| PHAX | NM_032177.3: p.Gly287* | LQEPKKDLIARVVRIIGNKKAIELLMETA | Stop Gain | 727. |
| | | EVEQNGGLFIMNGSRRRTPGG | | |
| DCAF8L1 | NM_001017930.1: p.Glu105* | DGGFLNDASTENQNTDSESSSEDVELES | Stop Gain | 728. |
| | | MGEGLFGYPLVGEETEREEEEG | | |
| HCLS1 | NM_005335.4: p.Glu214* | KDKWDKAALGYDYKGETEKHESQRDY | Stop Gain | 729. |
| | | AKGFGGQYGIQKDRVDKSAVGFNG | | |
| CFHR5 | NM_030787.3: p.Arg206* | DAQPKKESYKVGDVLKFSCRKNLIRVGS | Stop Gain | 730. |
| | | DSVQCYQFGWSPNFPTCKGQVG | | |
| SGK1 | XM_005267096.1: p.Arg256* | NSTTSTFCGTPEYLAPEVLHKQPYDRTV | Stop Gain | 731. |
| | | DWWCLGAVLYEMLYGLPPFYSG | | |
| MED12L | NM_053002.4: p.Glu260* | STGDGPVPVPPEVEQAMKQWEYNEKLA | Stop Gain | 732. |
| | | FHMFQEGMLEKHEYLTWILDVLG | | |
| KCND2 | NM_012281.2: p.Arg532* | HCLEKTTNHEFVDEQVFEESCMEVATVN | Stop Gain | 733. |
| | | RPSSHSPSLSSQQGVTSTCCSG | | |
| FAT1 | XM_005262835.1: p.Ser2450* | EHAPHGHFVTCVKAYDADSSDIDKLQYS | Stop Gain | 734. |
| | | ILSGNDHKHFVIDSATGIITLG | | |
| FRMPD2 | NM_001018071.3: p.Glu191* | EDQPHRRCTLQSVLEACRVHEKEVSVYP | Stop Gain | 735. |
| | | APAGLHIRRLVGLVLGTISEVG | | |
| MTHFD1L | XM_005266909.1: p.Glu421* | NLHLTGDIHAITAANNLLAAAIDTRILHE | Stop Gain | 736. |
| | | NTQTDKALYNRLVPLVNGVRG | | |
| HMCN1 | NM_031935.2: p.Arg5598* | QDLIRLVAYTQDGVMHPRTTFLMVDEE | Stop Gain | 737. |
| | | QTVPFALRDENLKGVVYTTRPLG | | |
| SUPT16H | NM_007192.3: p.Arg998* | NPSEDDYEEEEEDSDEDYSSEAEESDYSK | Stop Gain | 738. |
| | | ESLGSEEESGKDWDELEEEAG | | |
| ZNF90 | NM_007138.1: p.Trp18* | GGGGGGGGGGGGGGGGGGGGGGGGGG | Stop Gain | 739. |
| | | GGGGGGMGPLEFRDVAIEFSLEEG | | |
| RD3 | NM_001164688.1: p.Arg38* | GGGGGGGGGGGGMSLISWLRWNEAPSR | Stop Gain | 740. |
| | | LSTRSPAEMVLETLMMELTGQMG | | |
| RABEP1 | NM_001083585.1: p.Glu148* | KQEAIDEVKRQWREEVASLQAVMKETV | Stop Gain | 741. |
| | | RDYEHQFHLRLEQERTQWAQYRG | | |
| BRCA2 | NM_000059.3: p.Ser3231* | HILHANDPKWSTPTKDCTSGPYTAQIIPG | Stop Gain | 742. |
| | | TGNKLLMSSPNCEIYYQSPLG | | |
| BBX | XM_005247644.1: p.Ser75* | LQWHPLLAKKLLDFSEEEEEEDEEEDIDK | Stop Gain | 743. |
| | | VQLLGADGLEQDVGETEDDEG | | |
| SLC35F3 | XM_005273070.1: p.Arg132* | STQLAKLTFRKFDAPFTLTWFATNWNFL | Stop Gain | 744. |
| | | FFPLYYVGHVCKSTEKQSVKQG | | |
| SHOX2 | NM_006884.3: p.Arg191* | RSRTNFTLEQLNELERLFDETHYPDAFM | Stop Gain | 745. |
| | | REELSQRLGLSEARVQVWFQNG | | |
| SCN3A | NM_006922.3: p.Arg1621* | EFVLKLVSLRHYYFTIGWNIFDFVVVILSI | Stop Gain | 746. |
| | | VGMFLAEMIEKYFVSPTLFG | | |
| TRIM59 | XM_005247394.1: p.Glu169* | CLTIGQHHGHPIDDLQSAYLKEKDTPQK | Stop Gain | 747. |
| | | LLEQLTDTHWTDLTHLIEKLKG | | |
| MANBA | NM_005908.3: p.Gly674* | MQAQCVKTETEFYRRSRSEIVDQQGHTM | Stop Gain | 748. |
| | | GALYWQLNDIWQAPSWASLEYG | | |
| CCDC62 | NM_201435.4: p.Arg40* | GGGGGGGGGGMNPPAAFLAGRQNIGSE | Stop Gain | 749. |
| | | VEISTIEKQRKELQLLIGELKDG | | |
| PTEN | NM_000314.4: p.Glu242* | LLFHKMMFETIPMFSGGTCNPQFVVCQL | Stop Gain | 750. |
| | | KVKIYSSNSGPTRREDKFMYFG | | |
| KRTAP10-9 | NM_198690.2: p.Gln212* | CQQSSCQPACCTSSPCQQSYCVPVCCKP | Stop Gain | 751. |
| | | VCCKPICCVPVCSGASSLCCQG | | |
| IRAK1 | NM_001025243.1: p.Gln280* | MRNTVYAVKRLKENADLEWTAVKQSFL | Stop Gain | 752. |
| | | TEVEQLSRFRHPNIVDFAGYCAG | | |
| RDH5 | NM_002905.3: p.Arg199* | LLQQARGRVINITSVLGRLAANGGGYCV | Stop Gain | 753. |
| | | SKFGLEAFSDSLRRDVAHFGIG | | |
| FCGR2B | NM_001190828.1: p.Glu71* | PQPWGHMLLWTAVLFLAAPPKAVLKLE | Stop Gain | 754. |
| | | PQWINVLQEDSVTLTCRGTHSPG | | |
| FAT3 | NM_001008781.2: p.Arg791* | GANILKIKAYDADSGFNGKVLFTISDGNT | Stop Gain | 755. |
| | | DSCFNIDMETGQLKVLMPMDG | | |
| GHDC | NM_001142622.1: p.Arg417* | GRAVGQWAGAKLLDHGCVESSILDSSA | Stop Gain | 756. |
| | | GSAPHYEVFVALRGLRNLSEENG | | |
| DNAH5 | XM_005248262.1: p.Glu3229* | EVRTLANRMNTGLEKLKEASESVAALSK | Stop Gain | 757. |
| | | ELEAKEKELQVANDKADMVLKG | | |
| BAG4 | NM_001204878.1: p.Glu160* | NTASYSGAYYAPGYTQTSYSTEVPSTYR | Stop Gain | 758. |
| | | SSGNSPTPVSRWIYPQQDCQTG | | |
| DRC1 | NM_145038.2: p.Gln448* | WEIWLMNEEEAKDLIARAFDVDRIIHTH | Stop Gain | 759. |
| | | HLGLPWAAPDFWFLNNVGPISG | | |
| GPR63 | NM_030784.3: p.Arg402* | STWLLWLCYLKSALNPLIYYWRIKKFHD | Stop Gain | 760. |
| | | ACLDMMPKSFKFLPQLPGHTKG | | |
| TMX3 | XM_005266711.1: p.Arg108* | HSQLLQLSRASMAAWKSWTALRLCATV | Stop Gain | 761. |
| | | VVLDMVVCKGFVEDLDESFKENG | | |
| MC2R | NM_000529.2: p.Ser7* | GGGGGGGGGGGGGGGGGGGGGGGGGG | Stop Gain | 762. |
| | | GGGGGGGGGGGGGGGGGMKHIING | | |
| AK7 | XM_005267312.1: p.Arg526* | DDVRGRMFPFDKLIIPEFVCALDASDEFL | Stop Gain | 763. |
| | | KERVINLPESIVAGTHYSQDG | | |
| RBM25 | XM_005267955.1: p.Gly124* | KAKENDENCGPTTTVFVGNISEKASDML | Stop Gain | 764. |
| | | IRQLLAKCGLVLSWKRVQGASG | | |
| FNBP4 | XM_005252834.1: p.Cys390* | ERWRRKVICKEEPVSEVKETSTTVEEATT | Stop Gain | 765. |
| | | IVKPQEIMLDNIEDPSQEDLG | | |
| FCRLA | NM_032738.3: p.Arg131* | YTFSEPFHLIVSYDWLILQGPAKPVFEGD | Stop Gain | 766. |
| | | LLVLRCQAWQDWPLTQVTFYG | | |
| GALNT14 | NM_001253827.1: p.Glu385* | KRTAEVWMDEYKQYYYAARPFALERPF | Stop Gain | 767. |
| | | GNVESRLDLRKNLRCQSFKWYLG | | |
| DOCK3 | XM_005264917.1: p.Arg362* | YRRPYGCAVLSILDVLQSLTEVKEEKDF | Stop Gain | 768. |
| | | VLKVYTCNNESEWSQIHENIIG | | |
| PLCB2 | XM_005254446.1: p.Gln1116* | LKREINNSHIQEVVQVIKQMTENLERHQE | Stop Gain | 769. |
| | | KLEEKQAACLEQIREMEKQFG | | |
| JAG2 | NM_002226.4: p.Cys432* | ALDIDECASNPCAAGGTCVDQVDGFECI | Stop Gain | 770. |
| | | CPEQWVGATCQLDANECEGKPG | | |
| CIT | XM_005253829.1: p.Gly1099* | PHTTCWPGRTLYLLAPSFPDKQRWVTAL | Stop Gain | 771. |
| | | ESVVAGGRVSREKAEADAKLLG | | |
| OSMR | XM_005248387.1: p.Trp257* | NKGTNIYCEASQGNVSEGMKGIVLFVSK | Stop Gain | 772. |
| | | VLEEPKDFSCETEDFKTLHCTG | | |
| DOCK2 | NM_004946.2: p.Arg1370* | NLIQQAKFYESIMKILRPKPDYFAVGYYG | Stop Gain | 773. |
| | | QGFPSFLRNKVFIYRGKEYEG | | |
| ZNF100 | XM_005259785.1: p.Ser115* | IIHTGEKPYRCEECGKAFNRSSHLTTHKRI | Stop Gain | 774. |
| | | HTGVKPYKCTECGKAFNRSG | | |
| TMEM86B | NM_173804.4: p.Gln141* | IWPAAFVPGMAAFATAHLLYVWAFGFSP | Stop Gain | 775. |
| | | LQPGLLLLIILAPGPYLSLVLG | | |
| LRRFIP2 | XM_005265550.1: p.Ser438* | TPNGDVSHEPVAGAITVVSQEAAQVLES | Stop Gain | 776. |
| | | AGEGPLDVRLRKLAGEKEELLG | | |
| ZNF786 | NM_152411.3: p.Glu73* | QDLEAWQKELYKHVMRSNYETLVSLDD | Stop Gain | 777. |
| | | GLPKPELISWIEHGGEPFRKWRG | | |
| UBR5 | XM_005250959.1: p.Arg2261* | FEVKESKFRREMEKLRNQQSRDLSLEVK | Stop Gain | 778. |
| | | VDRDRDLLIQQTMRQLNNHFGG | | |
| RICTOR | XM_005248277.1: p.Arg148* | VRAAGLRALRYLIQDSSILQKVLKLKVD | Stop Gain | 779. |
| | | YLIARCIDIQQSNEVERTQALG | | |
| CLSTN2 | NM_022131.2: p.Arg723* | PGDVKTTDPKSEVLEEMLHNLDFCDILVI | Stop Gain | 780. |
| | | GGDLDPRQECLELNHSELHQG | | |
| MFAP1 | NM_005926.2: p.Arg282* | AEERRKYTLKIVEEETKKELEENKRSLAA | Stop Gain | 781. |
| | | LDALNTDDENDEEEYEAWKVG | | |
| MYOM2 | NM_003970.2: p.Trp859* | MPEPGPAYDLTFCEVRDTSLVMLWKAP | Stop Gain | 782. |
| | | VYSGSSPVSGYFVDFREEDAGEG | | |
| CUL4B | XM_005262481.1: p.Arg858* | KFICNDDFKHKLFRIKINQIQMKETVEEQ | Stop Gain | 783. |
| | | ASTTERVFQDRQYQIDAAIVG | | |
| UGT2A2 | NM_001105677.2: p.Arg466* | GAAVEVNLNTMTSVDLLSALRTVINEPS | Stop Gain | 784. |
| | | YKENAMRLSRIHHDQPVKPLDG | | |
| OR2M5 | NM_001004690.1: p.Gly249* | FICCIVMIVFPVAIIIASYARVILAVIHMGS | Stop Gain | 785. |
| | | GEGRRKAFTTCSSHLMVVG | | |
| BNIP2 | NM_004330.2: p.Arg356* | LMDNLFKYVIGTLELLVAENYMIVYLNG | Stop Gain | 786. |
| | | ATTRRKMPSLGWLRKCYQQIDG | | |
| DDX50 | NM_024045.1: p.Arg726* | RQRSGWSSGRSGRSGRSGGRSGGRSGRQ | Stop Gain | 787. |
| | | SRQGSRSGSRQDGRRRSGNRNG | | |
| OGDH | XM_005249762.1: p.Arg176* | HLAVQSLIRAYQVRGHHIAKLDPLGISCV | Stop Gain | 788. |
| | | NFDDAPVTVSSNVDLAVFKEG | | |
| TRPM8 | NM_024080.4: p.Trp1055* | CSRLNIPFPFIVFAYFYMVVKKCFKCCCK | Stop Gain | 789. |
| | | EKNMESSVCCFKNEDNETLAG | | |
| CDH1 | XM_005256272.1: p.Arg63* | LLQVSSWLCQEPEPCHPGFDAESYTFTVP | Stop Gain | 790. |
| | | RRHLERGRVLGRVNFEDCTGG | | |
| CNGA1 | NM_000087.3: p.Arg32* | GGGGGGGGGGGGGGGGGGMKLSMKN | Stop Gain | 791. |
| | | NIINTQQSFVTMPNVIVPDIEKEIG | | |
| CDC25A | NM_201567.1: p.Ser23* | GGGGGGGGGGGGGGGGGGGGGGGGGG | Stop Gain | 792. |
| | | GMELGPEPPHRRRLLFACSPPPAG | | |
| DCST2 | NM_144622.2: p.Tyr389* | QALFYRYCYLNWDHYDNIYITSRFLRME | Stop Gain | 793. |
| | | AVRSTAGLPTVLPLSAHEARRG | | |
| ZNF568 | NM_001204839.1: p.Arg538* | HQRAHTGEKPYECKECEKAFTCSTELVR | Stop Gain | 794. |
| | | HQKVHTGERPHKCKECGKAFIG | | |
| ATP10D | NM_020453.3: p.Arg13* | GGGGGGGGGGGGGGGGGGGGGGGGGG | Stop Gain | 795. |
| | | GGGGGGGGGGGMTEALQWARYHWG | | |
| PPFIA3 | NM_003660.3: p.Glu925* | DTEIQREIGISNPLHRLKLRLAIQEMVSLT | Stop Gain | 796. |
| | | SPSAPASSRTSTGNVWMTHG | | |
| ZNFX1 | NM_021035.2: p.Cys773* | ESEQELHEGAKTLECTMRGVLREQYLQK | Stop Gain | 797. |
| | | YISPQHWESLMNGPVQDSEWIG | | |
| SMAP2 | NM_022733.2: p.Arg37* | GGGGGGGGGGGGGMTGKSVKDVDRYQ | Stop Gain | 798. |
| | | AVLANLLLEEDNKFCADCQSKGPG | | |
| ZNF397 | NM_032347.2: p.Arg213* | DIHLQPLKTQLKSWKPCLSPKSDCENSET | Stop Gain | 799. |
| | | ATKEGISEEKSQGLPQEPSFG | | |
| HDC | XM_005254328.1: p.Arg40* | GGGGGGGGGGMMEPEEYRERGREMVD | Stop Gain | 800. |
| | | YICQYLSTVRERRVTPDVQPGYLG | | |
| ATP7A | NM_000052.5: p.Glu548* | CASCVANIERNLRREEGIYSILVALMAGK | Stop Gain | 801. |
| | | AEVRYNPAVIQPPMIAEFIRG | | |
| INTS1 | NM_001080453.2: p.Tyr608* | EAGIAWDKGEKRNLEVLRSFQNQIAAIQ | Stop Gain | 802. |
| | | RDAVWWLHTVVPSISKLAPKDG | | |
| COL4A6 | XM_005262073.1: p.Arg50* | MHPGLWLLLVTLCLTEELAAAGEKSYG | Stop Gain | 803. |
| | | KPCGGQDCSGSCQCFPEKGARGG | | |
| FAM160B1 | NM_020940.3: p.Arg704* | LQVTSVLSRLSLFPHPHIHEYLLDPYVNL | Stop Gain | 804. |
| | | APGCRSLFSVIVRVVGDLMLG | | |
| VHL | NM_000551.3: p.Arg177* | LLVNQTELFVPSLNVDGQPIFANITLPVY | Stop Gain | 805. |
| | | TLKERCLQVVRSLVKPENYRG | | |
| PIK3CB | NM_001256045.1: p.Trp94* | KFLPVLKEILDRDPLSQLCENEMDLIWTL | Stop Gain | 806. |
| | | RQDCREIFPQSLPKLLLSIKG | | |
| FFAR3 | NM_005304.3: p.Met1? | GGGGGGGGGGGGGGGGGGGGGGGGG | Start Loss | 807. |
| | | MVEAANGMHWPLPFILCPLSGFIFF | | |
| ZNF649 | NM_023074.3: p.Glu179* | AEFNGDGAFLHDNHEQMPTEIEFPESRKP | Stop Gain | 808. |
| | | ISTKSQFLKHQQTHNIEKAHG | | |
| NDST2 | XM_005270255.1: p.Arg82* | FLAYYVSTSPKAKEPLPLPLGDCSSGGAA | Stop Gain | 809. |
| | | GPGPARPPVPPRPPRPPETAG | | |
| ZNF786 | XM_005249945.1: p.Arg241* | MPWSSPRVQRHFRCGVCGKSFRRKLCLL | Stop Gain | 810. |
| | | RHLAAHTGRGPFRNADGEMCFG | | |
| PRDM10 | NM_020228.2: p.Arg394* | RKVLREQEKNWPCYECNRRFISSEQLQQ | Stop Gain | 811. |
| | | HLNSHDEKLDVFSRTRGRGRGG | | |
| GABRA1 | NM_001127645.1: p.Arg421* | ATSYTPNLARGDPGLATIAKSATIEPKEV | Stop Gain | 812. |
| | | KPETKPPEPKKTFNSVSKIDG | | |
| NOX4 | NM_016931.3: p.Arg382* | ARPGQYITLHCPSVSALENHPFTLTMCPT | Stop Gain | 813. |
| | | ETKATFGVHLKIVGDWTERFG | | |
| B3GALNT2 | NM_152490.3: p.Cys491* | SMGIWMAAIGPKRYQDSLWLCEKTCET | Stop Gain | 814. |
| | | GMLSSPQYSPWELTELWKLKERG | | |
| CEP57L1 | NM_173830.4: p.Arg443* | KVQNSKMSEASGIQQEDSYPKGSKNIKN | Stop Gain | 815. |
| | | SPRKCLTDTNLFQKNSSFHPIG | | |
| RNF17 | NM_031277.2: p.Glu487* | IKDAKVLEKKVNEFCNRSSHLDPSDILEL | Stop Gain | 816. |
| | | GARIFVSSIKNGMWCRGTITG | | |
| FUBP1 | NM_003902.3: p.Trp537* | PYNPGPPGPAPHGPPAPYAPQGWGNAYP | Stop Gain | 817. |
| | | HWQQQAPPDPAKAGTDPNSAAG | | |
| HTR2C | NM_001256761.1: p.Glu244* | ADDYGDYVLPDHLRSAPTSFDVTARPHR | Stop Gain | 818. |
| | | GTAWTKSGFPEVLQEEYGRGRG | | |
| MTM1 | XM_005274687.1: p.Glu41* | GGGGGGGGGMASASTSKYNSHSLENESI | Stop Gain | 819. |
| | | KRTSRDGVNRDLTEAVPRLPGG | | |
| TTF2 | NM_003594.3: p.Arg746* | SLVAKEIPTNKQEAEIPGANLNVEGTSTP | Stop Gain | 820. |
| | | LLRIAWARIILDEAHNVKNPG | | |
| MYBL1 | NM_001144755.1: p.Arg76* | KGLKKLWNRVKWTRDEDDKLKKLVEQ | Stop Gain | 821. |
| | | HGTDDWTLIASHLQNRSDFQCQHG | | |
| CFH | NM_000186.3: p.Arg1149* | PQCKDSTGKCGPPPPIDNGDITSFPLSVYA | Stop Gain | 822. |
| | | PASSVEYQCQNLYQLEGNKG | | |
| CCDC102B | XM_005266767.1: p.Glu441* | ELLDKKNRLSANSQSPDFKMSQIDLQEK | Stop Gain | 823. |
| | | NQLDDSLNQIRKLQRSLDEEKG | | |
| KIAA1279 | NM_015634.3: p.Arg549* | SHIVKKINNLNKSALKYYQLFLDSLRDPN | Stop Gain | 824. |
| | | KVFPEHIGEDVLRPAMLAKFG | | |
| ABI3BP | XM_005247310.1: p.Met1? | GGGGGGGGGGGGGGGGGGGGGGGGG | Start Loss | 825. |
| | | MLSSLGCLLLCGSITLALGNAQKLP | | |
| NF1 | XM_005257986.1: p.Gln1055* | VHAIQIKTKLCQLVEVMMARRDDLSFCQ | Stop Gain | 826. |
| | | EMKFRNKMVEYLTDWVMGTSNG | | |
| MYOC | NM_000261.1: p.Metl? | GGGGGGGGGGGGGGGGGGGGGGGGG | Start Loss | 827. |
| | | MPAVQLLLLACLVWDVGARTAQLRK | | |
| VPS13C | NM_017684.4: p.Glu502* | IDDLMTPEEKDKLFTAIGYSESTHNLTLP | Stop Gain | 828. |
| | | KQYVAHIMTLKLVSTSVTIRG | | |
| C14orf39 | NM_174978.2: p.Glu219* | RVPAPFPSLTKWTLNIVNLRCETQDILKH | Stop Gain | 829. |
| | | ASNLTKSSSELKKEVDEMEIG | | |
| RGS6 | NM_001204419.1: p.Arg292* | QSPVHVLSQPIRKTTKEDIRKQITFLNAQI | Stop Gain | 830. |
| | | DRHCLKMSKVAESKEPSQQG | | |
| UTP3 | NM_020368.2: p.Glu66* | RAKAGPTLTDENGDDLGLPPSPGDTSYY | Stop Gain | 831. |
| | | QDQVDDFHEARSRAALAKGWNG | | |
| TENM4 | NM_001098816.2: p.Arg1717* | HELAMMTYHGNSGLLATKSNENGWTTF | Stop Gain | 832. |
| | | YEYDSFGRLTNVTFPTGQVSSFG | | |
| ZNF18 | XM_005256786.1: p.Glu363* | QASGEVPSQASLRGFFTEDEPGCFGEGEN | Stop Gain | 833. |
| | | LPEALQNIQDEGTGEQLSPQG | | |
| AJUBA | XM_005268131.1: p.Gln103* | GGPGDEPLEPAREQGSLDAERNQRGSFE | Stop Gain | 834. |
| | | APRYEGSFPAGPPPTRALPLPG | | |
| PLD1 | NM_002662.4: p.Arg1032* | FKEVWVSTAARNATIYDKVFRCLPNDEV | Stop Gain | 835. |
| | | HNLIQLRDFINKPVLAKEDPIG | | |
| WDR59 | XM_005256146.1: p.Arg858* | SCSSMSDPGLNTGGWNIAGREAEHLSSP | Stop Gain | 836. |
| | | WGESSPEELRFGSLTYSDPREG | | |
| TCF7 | NM_001134851.2: p.Glu250* | AKYYELARKERQLHMQLYPGWSARDN | Stop Gain | 837. |
| | | YGKKKRRSREKHQESTTETNWPRG | | |
| SLC26A8 | NM_052961.3: p.Arg18* | GGGGGGGGGGGGGGGGGGGGGGGGGG | Stop Gain | 838. |
| | | GGGGGGMAQLERSAISGFSSKSRG | | |
| TSC22D2 | XM_005247920.1: p.Ser713* | NKIEQAMDLVKSHLMYAVREEVEVLKE | Stop Gain | 839. |
| | | QIKELVERNSLLERENALLKSLG | | |
| PPP3CC | NM_001243975.1: p.Arg163* | DYVDRGYFSIECVLYLWSLKINHPKTLFL | Stop Gain | 840. |
| | | LRGNHECRHLTDYFTFKQECG | | |
| CHFR | NM_001161345.1: p.Gln507* | GDAPSTSVSLTTVQDYVCPLQGSHALCT | Stop Gain | 841. |
| | | CCFQPMPDRRAEREQDPRVAPG | | |
| GRIA3 | NM_000828.4: p.Glu201* | LLGHYKWEKFVYLYDTERGFSILQAIME | Stop Gain | 842. |
| | | AAVQNNWQVTARSVGNIKDVQG | | |
| IZUMO3 | XM_005251333.1: p.Glu89* | DVCQNLESKLKELLKNFSEIACSEDCIVV | Stop Gain | 843. |
| | | EGPILDCWTCLRMTNRCFKGG | | |
| TCEB3 | NM_003198.2: p.Arg148* | KKLVPVERNAEPDEQDFEKSNSRKRPRD | Stop Gain | 844. |
| | | ALQKEEEMEGDYQETWKATGSG | | |
| ZCCHC16 | NM_001004308.2: p.Met1? | GGGGGGGGGGGGGGGGGGGGGGGGG | Start Loss | 845. |
| | | MQVEPSFLQAENLILRLQMQHPTTE | | |
| ITGB3BP | NM_001206739.1: p.Glu116* | SVITYSPTTGTCQMSLFASPTSSEEQKHR | Stop Gain | 846. |
| | | NGLSNEKRKKLNHPSLTESKG | | |
| MEIS2 | NM_172316.2: p.Arg256* | LFQHLTHPYPSEEQKKQLAQDTGLTILQV | Stop Gain | 847. |
| | | NNWFINARRRIVQPMIDQSNG | | |
| PLCB4 | XM_005260727.1: p.Trp151* | SGTDLVNISFTYMVAENPEVTKQWVEGL | Stop Gain | 848. |
| | | RSIIHNFRANNVSPMTCLKKHG | | |
| METAP1 | NM_015143.2: p.Arg140* | YPLMPTRPVPSYIQRPDYADHPLGMSESE | Stop Gain | 849. |
| | | QALKGTSQIKLLSSEDIEGMG | | |
| CRHBP | NM_001882.3: p.Glu316* | FHGPAQMKVGCDNTVVRMVSSGKHVN | Stop Gain | 850. |
| | | RVTFEYRQLEPYELENPNGNSIGG | | |
| DEF6 | NM_022047.3: p.Gln220* | QVAQTTGGLSVWQFLELFNSGRCLRGV | Stop Gain | 851. |
| | | GRDTLSMAIHEVYQELIQDVLKG | | |
| F11 | XM_005262824.1: p.Glu466* | CGGSIIGNQWILTAAHCFYGVESPKILRV | Stop Gain | 852. |
| | | YSGILNQSEIKEDTSFFGVQG | | |
| CCDC144A | XM_005256877.1: p.Arg1183* | WTDLLKQQPTSEATSRCHINLDETQDSK | Stop Gain | 853. |
| | | KKLGQIRSEIDLTEAQETVPSG | | |
| DNAH10 | XM_005253555.1: p.Trp3526* | LSYEGAFTWEFRDEMVNRIWQNDILERE | Stop Gain | 854. |
| | | IPLSQPFRLESLLTDDVEISRG | | |
| SPEN | NM_015001.2: p.Arg1265* | QDVTDDSPPSKKKRMDHVDFDICTKRER | Stop Gain | 855. |
| | | NYRSSRQISEDSERTGGSPSVG | | |
| ADIG | NM_001018082.1: p.Trp34* | GGGGGGGGGGGGGGGGMKYPLMPLVN | Stop Gain | 856. |
| | | DLTFSFLVFWFCLPVGLLLLLIIG | | |
| UGT2A3 | NM_024743.3: p.Arg457* | GAAVEINFKTMTSEDLLRALRTVITDSSY | Stop Gain | 857. |
| | | KENAMRLSRIHHDQPVKPLDG | | |
| TBX4 | XM_005257836.1: p.Arg371* | YQHENGAHSQLAEPQDLPLSTFPTQRDSS | Stop Gain | 858. |
| | | LFYHCLKRRDGTRHLDLPCKG | | |
| NDUFAF6 | XM_005250789.1: p.Trp25fs | GGGGGGGGGGGGGGGGGGGGGGGGG | Stop Gain | 859. |
| | | MWNWLRLVKDSVSEKTIGLMRMQFG | (Frameshift) | |
| CACNB2 | NM_201570.2: p.Arg114* | KPVAFAVRTNVSYSAAHEDDVPVPGMAI | Stop Gain | 860. |
| | | SFEAKDFLHVKEKFNNDWWIGG | | |
| EBNA1BP2 | NM_001159936.1: p.Arg206* | FQREMSFYRQAQAAVLAVLPRLHQLKV | Stop Gain | 861. |
| | | PTKRPTDYFAEMAKSDLQMQKIG | | |
| HCLS1 | NM_005335.4: p.Arg37* | GGGGGGGGGGGGGMWKSVVGHDVSVS | Stop Gain | 862. |
| | | VETQGDDWDTDPDFVNDISEKEQG | | |
| PCDHA5 | NM_018908.2: p.Trp23* | GGGGGGGGGGGGGGGGGGGGGGGGGG | Stop Gain | 863. |
| | | GMVYSRRGSLGSRLLLLWLLLAYG | | |
| CHDC2 | NM_173695.2: p.Gln32* | GGGGGGGGGGGGGGGGGGMAIHLDKQ | Stop Gain | 864. |
| | | NIILKNDKDEYLKKTRDGVLPPYG | | |
| ZNF415 | NM_001136038.2: p.Ser313* | RVHTGEKPYKCNECDRSFSRNSCLALHR | Stop Gain | 865. |
| | | RVHTGEKPYKCYECDKVFSRNG | | |
| LRRK2 | NM_198578.3: p.Arg1552* | TIINESLNFKIRDQLVVGQLIPDCYVELEK | Stop Gain | 866. |
| | | IILSERKNVPIEFPVIDRKG | | |
| KHK | NM_006488.2: p.Gln85* | RWQRGGNASNSCTVLSLLGAPCAFMGS | Stop Gain | 867. |
| | | MAPGHVADFLVADFRRRGVDVSG | | |
| ENAH | XM_005273182.1: p.Arg246* | RERLEQEQLERERQERERQERLERQERLE | Stop Gain | 868. |
| | | RQERLERQERLDRERQERQEG | | |
| TTN | NM_133437.3: p.Arg109* | DGRAKLTIPAVTKANSGRYSLKATNGSG | Stop Gain | 869. |
| | | QATSTAELLVKAETAPPNFVQG | | |
| GRIPAP1 | NM_020137.3: p.Arg631* | HLKTISSLKQEVKDTVDGQRILEKKGSA | Stop Gain | 870. |
| | | ALKDLKRQLHLERKRADKLQEG | | |
| RIMKLA | NM_173642.3: p.Ser81* | EQDVRFRAVLMDQIAVTIVGGHLGLQLN | Stop Gain | 871. |
| | | QKALTTFPDVVLVRVPTPSVQG | | |
| SLC16A9 | NM_194298.2: p.Arg136* | FMVAGGLMLSSFAPNIYFLFFSYGIVVGL | Stop Gain | 872. |
| | | GCGLLYTATVTITCQYFDDRG | | |
| QRICH2 | XM_005257728.1: p.Gln823* | PGVDQHGLAQPGEVQRSLVQPGIVQRGL | Stop Gain | 873. |
| | | VQPGAVQRGLVQPGAVQRGLVG | | |
| VCAN | NM_004385.4: p.Glu1914* | EVAGTLSPHVETTFSTEPTGLVLSTVMDR | Stop Gain | 874. |
| | | VVAENITQTSREIVISERLGG | | |
| RASA1 | NM_002890.2: p.Arg1010* | KSNKHRMIMFLDELGNVPELPDTTEHSR | Stop Gain | 875. |
| | | TDLSRDLAALHEICVAHSDELG | | |
| PSMB9 | XM_005249236.1: p.Arg67* | HTGTTIMAVEFDGGVVMGSDSRVSAGIE | Stop Gain | 876. |
| | | LEEPPLVLAAANVVRNISYKYG | | |
| SLC17A6 | NM_020346.2: p.Trp202* | RVFGAAILLTSTLNMLIPSAARVHYGCVI | Stop Gain | 877. |
| | | FVRILQGLVEGVTYPACHGIG | | |
| MYO7A | NM_000260.3: p.Gln594* | HETQFGINHFAGIVYYETQGFLEKNRDTL | Stop Gain | 878. |
| | | HGDIIQLVHSSRNKFIKQIFG | | |
| MYOF | NM_013451.3: p.Arg723* | LKSGIQGKIPANQLAELWLKLIDEVIEDT | Stop Gain | 879. |
| | | RYTLPLTEGKANVTVLDTQIG | | |
| CDKNIA | XM_005248787.1: p.Gln44* | GGGGGGMWGVFRRQTTHSSNPPLPGQQ | Stop Gain | 880. |
| | | SCCNHRDFFCSGAMSEPAGDVRG | | |
| ITGA5 | NM_002205.2: p.Arg598* | DWQKQKGGVRRALFLASRQATLTQTLLI | Stop Gain | 881. |
| | | QNGAREDCREMKIYLRNESEFG | | |
| UNC13C | XM_005254395.1: p.Arg2121* | KRKQGTKTKSNTWSPKYNETFQFILGKE | Stop Gain | 882. |
| | | NRPGAYELHLSVKDYCFAREDG | | |
| RB1 | NM_000321.2: p.Arg358* | NGLPEVENLSKRYEEIYLKNKDLDARLF | Stop Gain | 883. |
| | | LDHDKTLQTDSIDSFETQRTPG | | |
| FRMPD2 | NM_001042512.2: p.Glu199* | STEGLIFQEVLHLLRGAPQEVTLLLCRPPP | Stop Gain | 884. |
| | | GALPELEQEWQTPELSADKG | | |
| CSTF2T | NM_015235.2: p.Arg327* | GSLTPGGAMQPQLGMPGVGPVPLERGQ | Stop Gain | 885. |
| | | VQMSDPRAPIPRGPVTPGGLPPG | | |
| PLK1 | NM_005030.3: p.Arg364* | PITCLTIPPRFSIAPSSLDPSNRKPLTVLNK | Stop Gain | 886. |
| | | GLENPLPERPREKEEPVVG | | |
| DST | XM_005249314.1: p.Glu2303* | LSSSGVFLNNASGREKDECTATPSSFNKC | Stop Gain | 887. |
| | | HCGEPEHEETPENRKCAIDEG | | |
| TACC2 | XM_005269402.1: p.Glu793* | SLCGALDYLEPDLAEKNPPLFAQKLQRE | Stop Gain | 888. |
| | | AAHPTDVSISKTALYSRIGTAG | | |
| BCLAF1 | XM_005267238.1: p.Arg22* | GGGGGGGGGGGGGGGGGGGGGGGGGG | Stop Gain | 889. |
| | | GGMGRSNSRSHSSRSKSRSQSSSG | | |
| INTS10 | XM_005273555.1: p.Arg692* | EGGKIHLELLPNQGMLIKPSSPPMGLLQQ | Stop Gain | 890. |
| | | EFLPVLQPSIQTADRHHTVTG | | |
| HTR1E | NM_000865.2: p.Cys108* | YLICSLAVTDLLVAVLVMPLSIIYIVMDR | Stop Gain | 891. |
| | | WKLGYFLCEVWLSVDMTCCTG | | |
| FAM83G | NM_001039999.2: p.Trp805* | PDPGSPRLAQNARPMTDGRATEEHPSPF | Stop Gain | 892. |
| | | GIPYSKLSQSKHLKARTGGSQG | | |
| SETBP1 | NM_015559.2: p.Arg625* | SLTVITPVKKKRGRPKKQPLLTVETIHEG | Stop Gain | 893. |
| | | TSTSPVSPISREFPGTKKRKG | | |
| SEMA5A | NM_003966.2: p.Glu69* | AHPEAQGTTQCORTEHPVISYKEIGPWLR | Stop Gain | 894. |
| | | EFRAKNAVDFSQLTFDPGQKG | | |
| C12orf29 | XM_005269222.1: p.Glu92* | IYSAIPTEKVDGTCCYVTTYKDQPYLWA | Stop Gain | 895. |
| | | RLDRKPNKQAEKRFKNFLHSKG | | |
| EPHA3 | XM_005264715.1: p.Trp918* | KFEQIVSILDKLIRNPGSLKIITSAAARPSN | Stop Gain | 896. |
| | | LLLDQSNVDITTFRTTGDG | | |
| KIF13B | XM_005273458.1: p.Arg159* | SYTMMGTADQPGLIPRLCSGLFERTQKE | Stop Gain | 897. |
| | | ENEEQSFKVEVSYMEIYNEKVG | | |
| ADAMTS20 | NM_025003.3: p.Glu817* | AEGNFLFNGNFLLSTSKKEINVQGTRTVI | Stop Gain | 898. |
| | | EYSGSNNAVERINSTNRQEKG | | |
| CLTC | XM_005257012.1: p.Gln1083* | KADRTRVMEYINRLDNYDAPDIANIAISN | Stop Gain | 899. |
| | | ELFEEAFAIFRKFDVNTSAVG | | |
| CC2D2B | XM_005269814.1: p.Arg894* | KQLLPKNVQGTKIQSIQPEEIIYFETDKSM | Stop Gain | 900. |
| | | VEDLRNRIERTLKSKVMEWG | | |
| VWA5A | XM_005271550.1: p.Gln361* | TLILLLKSLPIGCYFNIYGFGSSYEACFPES | Stop Gain | 901. |
| | | VKYTQQTMEEALGRVKLMG | | |
| ZFAT | NM_001167583.2: p.Ser13* | GGGGGGGGGGGGGGGGGGGGGGGGGG | Stop Gain | 902. |
| | | GGGGGGGGGGGMCKCCNLFSPNQG | | |
| PLSCR4 | XM_005247655.1: p.Gly40* | GGGGGGGGGGMSGVVPTAPEQPAGEME | Stop Gain | 903. |
| | | NQTKPPDPRPDAPPEYNSHFLPG | | |
| CENPF | XM_005273008.1: p.Glu1232* | SERNQCNFKPQMDLEVKEISLDSYNAQL | Stop Gain | 904. |
| | | VQLEAMLRNKELKLQESEKEKG | | |
| C17orf74 | NM_175734.4: p.Glu187* | CCNHQQRPQNYRQIPHSHSVFRNPHRSQ | Stop Gain | 905. |
| | | KMSQLHRVPFFDQEDPDSYLEG | | |
| TLE1 | XM_005252154.1: p.Gly651* | ELTSSAPACYALAISPDSKVCFSCCSDGNI | Stop Gain | 906. |
| | | AVWDLHNQTLVRQFQGHTDG | | |
| BEND2 | NM_153346.4: p.Glu786* | ICDLSENGRDWKSCVTSINSGIRSLRHDV | Stop Gain | 907. |
| | | RRAEARSQSLPAVTPPELEQG | | |
| GNA13 | NM_006572.4: p.Ser7* | GGGGGGGGGGGGGGGGGGGGGGGGGG | Stop Gain | 908. |
| | | GGGGGGGGGGGGGGGGGMADFLPG | | |
| ACAD11 | NM_032169.4: p.Cys503* | EETGKCFFAPDVFNCQAPDTGNMEVLHL | Stop Gain | 909. |
| | | YGSEEQKKQWLEPLLQGNITSG | | |
| DIO1 | NM_001039716.1: p.Glu141* | APNCPVVRLSGQRCNIWEFMQGNRPLVL | Stop Gain | 910. |
| | | NFGSCTGPSFMFKFDQFKRLIG | | |
| TP53 | NM_001126116.1: p.Gln12* | GGGGGGGGGGGGGGGGGGGGGGGGGG | Stop Gain | 911. |
| | | GGGGGGGGGGGGMFCQLAKTCPVG | | |
| IFNA8 | NM_002170.3: p.Gln148* | ALDETLLDEFYIELDQQLNDLESCVMQE | Stop Gain | 912. |
| | | VGVIESPLMYEDSILAVRKYFG | | |
| LNPEP | NM_005575.2: p.Ser217* | LPTAVVPLRYELSLHPNLTSMTFRGSVTI | Stop Gain | 913. |
| | | SVQALQVTWNIILHSTGHNIG | | |
| PPP6R3 | XM_005274085.1: p.Glu9* | GGGGGGGGGGGGGGGGGGGGGGGGGG | Stop Gain | 914. |
| | | GGGGGGGGGGGGGGGMNDRLGEDG | | |
| STAB2 | NM_017564.9: p.Arg69* | SPAETTGQARRCDRKSLLTIRTECRSCAL | Stop Gain | 915. |
| | | NLGVKCPDGYTMITSGSVGVG | | |
| RADIL | NM_018059.4: p.Arg150* | ALDPRQAGQYVLCDVVGQAGDAGQRW | Stop Gain | 916. |
| | | QARCFRVFGDSEKPLLIQELWKPG | | |
| TMC4 | NM_144686.2: p.Glu453* | VFKLIAPLEGYTRSRQIVFILLRTVFLRLA | Stop Gain | 917. |
| | | SLVVLLFSLWNQITCGGDSG | | |
| ITGAX | NM_000887.3: p.Glu115* | LYQCGYSTGACEPIGLQVPPEAVNMSLG | Stop Gain | 918. |
| | | LSLASTTSPSQLLACGPTVHHG | | |
| NCAM2 | XM_005260988.1: p.Glu656* | EMRTEDERVTNHEDGSPVNEPNETTPLT | Stop Gain | 919. |
| | | EPEKLPLKEEDGKEALNPETIG | | |
| DNAH7 | NM_018897.2: p.Gly2913* | NQVDLCSKKLERAEQLIGGLGGEKTRWS | Stop Gain | 920. |
| | | HTALELGQLYINLTGDILISSG | | |
| KIAA0408 | NM_014702.4: p.Arg688* | SMSVNASHGKGFSRPARPANRRLPSRWA | Stop Gain | 921. |
| | | SRSPSAPPALRRTTHNYTISLG | | |
| C12orf50 | NM_152589.1: p.Arg327* | PVKKPHFKGVKKRKWIYDEPQNFPNSG | Stop Gain | 922. |
| | | MQRAVQAPRPQNKMSYHRNNKNG | | |
| TRPC1 | NM_003304.4: p.Glu376* | WPVLSLCYLIAPKSQFGRIIHTPFMKFIIH | Stop Gain | 923. |
| | | GASYFTFLLLLNLYSLVYNG | | |
| RANBP17 | NM_022897.3: p.Arg957* | PPVLMYVLTSISEGLTTLDTVVSSSCCTSL | Stop Gain | 924. |
| | | DYIVTYLFKHIAKEGKKPLG | | |
| TMEM63B | XM_005249217.1: p.Arg325* | YNVARLMFLDAERKKAERGKLYFTNLQ | Stop Gain | 925. |
| | | SKENVPTMINPKPCGHLCCCVVG | | |
| C14orf39 | NM_174978.2: p.Glu28* | GGGGGGGGGGGGGGGGGGGGGGMNDS | Stop Gain | 926. |
| | | LFVSLDRLLLEFVFQYEQDISTKG | | |
| NR3C2 | XM_005263014.1: p.Arg244* | CSPLNMTSSVCSPAGINSVSSTTASFGSFP | Stop Gain | 927. |
| | | VHSPITQGTPLTCSPNVENG | | |
| ZCRB1 | NM_033114.3: p.Arg99* | SKGVAFILFLDKDSAQNCTRAINNKQLFG | Stop Gain | 928. |
| | | RVIKASIAIDNGRAAEFIRRG | | |
| COL12A1 | NM_080645.2: p.Ser1089* | YLNVTDLKTYQIGWDTFCVKWSPHRAA | Stop Gain | 929. |
| | | TSYRLKLSPADGTRGQEITVRGG | | |
| NLRP13 | XM_005258510.1: p.Tyr443* | YFMRHFDDSSEVEKILQQLRKNETLFHSC | Stop Gain | 930. |
| | | SAPMVCWTVCSCLKQPKVRYG | | |
| LRRC39 | NM_144620.3: p.Arg115* | KIEKEEWKTLPSSLLKLNQLQEWQLHRT | Stop Gain | 931. |
| | | GLLKIPEFIGRFQNLIVLDLSG | | |
| CSMD1 | NM_033225.5: p.Gln1424* | SKSGFSIQFSTSIAATCNDPGMPQNGTRY | Stop Gain | 932. |
| | | GDSREAGDTVTFQCDPGYQLG | | |
| PTPRD | XM_005251529.1: p.Arg702* | DDKPHEILGIPSDTTKYLLEQLEKWTEYR | Stop Gain | 933. |
| | | ITVTAHTDVGPGPESLSVLIG | | |
| PARN | NM_001134477.2: p.Arg67* | TDSKYITKSFNFYVFPKPFNRSSPDVKFV | Stop Gain | 934. |
| | | CQSSSIDFLASQGFDFNKVFG | | |
| RLBP1 | NM_000326.4: p.Arg64* | EQELRAQLEQLTTKDHGPVFGPCSQLPR | Stop Gain | 935. |
| | | HTLQKAKDELNEREETREEAVG | | |
| SPTBN1 | XM_005264517.1: p.Gln995* | RKKDALLSALSIQNYHLECNETKSWIRE | Stop Gain | 936. |
| | | KTKVIESTQDLGNDLAGVMALG | | |
| ZNF513 | NM_001201459.1: p.Ser100* | GERPGPACQLCGGPTGEGPCCGAGGPGG | Stop Gain | 937. |
| | | GPLLPPRLLYSCRLCTFVSHYG | | |
| SLC40A1 | NM_014585.5: p.Arg178* | LTSCYILIITIANIANLASTATAITIQRDWI | Stop Gain | 938. |
| | | VVVAGEDRSKLANMNATIG | | |
| GTF3C3 | NM_012086.4: p.Glu667* | SVLTKDDWWNLLLKAIYSLCDLSRFQEA | Stop Gain | 939. |
| | | ELLVDSSLEYYSFYDDRQKRKG | | |
| C14orf166B | NM_194287.2: p.Arg299* | SLDLSWNNFHTRGAVALCNGLRGNVTL | Stop Gain | 940. |
| | | TKLDLSMNGFGNEVALALGEVLG | | |
| PDLIM5 | XM_005262698.1: p.Arg378* | LVALGKSWHPEEFNCAHCKNTMAYIGF | Stop Gain | 941. |
| | | VEEKGALYCELCYEKFFAPECGG | | |
| TNPO1 | NM_002270.3: p.Arg254* | CVNQFIISRTQALMLHIDSFIENLFALAGD | Stop Gain | 942. |
| | | EEPEVRKNVCRALVMLLEVG | | |
| FLT3 | NM_004119.2: p.Glu917* | KSDVWSYGILLWEIFSLGVNPYPGIPVDA | Stop Gain | 943. |
| | | NFYKLIQNGFKMDQPFYATEG | | |
| IBTK | NM_015525.2: p.Cys217* | LVDLFSRSGIYIKQVVLCKFHSVFLSQKG | Stop Gain | 944. |
| | | QVYTCGHGPGGRLGHGDEQTG | | |
| PGLYRP2 | NM_052890.3: p.Gln354* | GAGVARDPGFRSNFRRQNGAALTSASIL | Stop Gain | 945. |
| | | AQQVWGTLVLLQRLEPVHLQLG | | |
| FUK | NM_145059.2: p.Glu675* | SGPAANPEWMRPFSYLECGDLAAGVEA | Stop Gain | 946. |
| | | LAQERDKWLSRPALLVRAARHYG | | |
| KIAA0195 | NM_014738.4: p.Arg264* | DLFPPFSPPPSPRGEVERGPQSPQQHRLFR | Stop Gain | 947. |
| | | VLETPVIDNIRWCLDMALSG | | |
| TTC18 | XM_005269485.1: p.Glu793* | LYYEIQNNDIRMEMAFHEASKQLQARM | Stop Gain | 948. |
| | | LQAQVTKQKSTGVEDTEERGKRG | | |
| ZNF732 | NM_001137608.1: p.Glu112* | YKVKIHETVAKHPAVCSHFTQDFLPVQG | Stop Gain | 949. |
| | | IEDSFHKLILRRYEKCGHENLG | | |
| MCHR2 | NM_001040179.1: p.Trp20* | GGGGGGGGGGGGGGGGGGGGGGGGGG | Stop Gain | 950. |
| | | GGGGMNPFHASCWNTSAELLNKSG | | |
| SORL1 | NM_003105.5: p.Gly646* | FTIFGSNKENVHSWLILQVNATDALGVP | Stop Gain | 951. |
| | | CTENDYKLWSPSDERGNECLLG | | |
| CCDC105 | NM_173482.2: p.Trp201* | RQLLRQREVTDHRLSEVRKGLLINQQSV | Stop Gain | 952. |
| | | KLRGYRPKSEKVPDKADSMLTG | | |
| FBP2 | NM_003837.2: p.Arg314* | YPANQKSPKGKLRLLYECNPVAYIIEQA | Stop Gain | 953. |
| | | GGLATTGTQPVLDVKPEAIHQG | | |
| EVPL | XM_005257143.1: p.Trp1505* | AVERELRQLTLRIQELEKRPPTVQEKIIME | Stop Gain | 954. |
| | | EVVKLEKDPDLEKSTEALRG | | |
| C8orf34 | NM_001195639.1: p.Glu225* | LNAKKPKKSKSDLAVSNISPPSPDSKSLP | Stop Gain | 955. |
| | | RSVEHPKWNWRTKPQSRDFDG | | |
| PROZ | NM_001256134.1: p.Glu92* | QESLFLPASKANDVLVRWKRAGSYLLEE | Stop Gain | 956. |
| | | LFEGNLEKECYEEICVYEEARG | | |
| NF1 | XM_005257986.1: p.Gln2492* | LTVSEEVRSRCSLKHRKSLLLTDISMENV | Stop Gain | 957. |
| | | PMDTYPIHHGDPSYRTLKETG | | |
| FBXO32 | NM_148177.2: p.Tyr29* | GGGGGGGGGGGGGGGGGGGGGMNILE | Stop Gain | 958. |
| | | KVVLKVLEDQQNIRLIRELLQTLG | | |
| C12orf55 | XM_001715090.5: p.Glu813* | LLQNCCRALWNFTQELQILLKQAVDLDK | Stop Gain | 959. |
| | | TFPISQDGFLCTSVLPFYLGAG | | |
| PDZD2 | XM_005248269.1: p.Leu567* | YNELMVRNGDPRIRMLEVSRDGRKHSLP | Stop Gain | 960. |
| | | QLLDSSSASQEYHIVKKSTRSG | | |
| VOPP1 | NM_030796.3: p.Glu43* | GGGGGGGMRRQPAKVAALLLGLLLECT | Stop Gain | 961. |
| | | EAKKHCWYFEGLYPTYYICRSYG | | |
| MTOR | XM_005263439.1: p.Arg2278* | EILDGVELGEPAHKKTGTTVPESIHSFIGD | Stop Gain | 962. |
| | | GLVKPEALNKKAIQIINRVG | | |
| SRRD | NM_001013694.2: p.Gly274* | LYNNLLWSNWSVDALSKMVIIGNSFKGL | Stop Gain | 963. |
| | | EERLLARILQKNYPYIAKILKG | | |
| NAA38 | NM_016200.4: p.Arg44* | GGGGGGMTSALENYINRTVAVITSDGRM | Stop Gain | 964. |
| | | IVGTLKGFDQTINLILDESHEG | | |
| NAV3 | XM_005269215.1: p.Arg202* | GVNVQGLSAEEIRNGNLKAILGLFFSLSR | Stop Gain | 965. |
| | | YKQQQHHQQQYYQSLVELQQG | | |
| PLCD4 | NM_032726.3: p.Arg117* | TIRNGHDSELLRSLAEELPLEQGFTIVFHG | Stop Gain | 966. |
| | | RRSNLDLMANSVEEAQIWMG | | |
| MSH6 | NM_001281493.1: p.Glu644* | NPEGRFPDLTVELNRWDTAFDHEKARKT | Stop Gain | 967. |
| | | GLITPKAGFDSDYDQALADIRG | | |
| IRAK3 | NM_007199.2: p.Glu71* | PALLGELCAVLDSCDGALGWRGLAERLS | Stop Gain | 968. |
| | | SSWLDVRHIEKYVDQGKSGTRG | | |
| SF3B14 | NM_016047.3: p.Arg12* | GGGGGGGGGGGGGGGGGGGGGGGGGG | Stop Gain | 969. |
| | | GGGGGGGGGGGGMAMQAAKRANIG | | |
| RPRD1B | XM_005260480.1: p.Arg65* | TFQQIQEEEDDDYPGSYSPQDPSAGPLLT | Stop Gain | 970. |
| | | EELIKALQDLENAASGDATVG | | |
| TTN | NM_133437.3: p.Arg3147* | GRDVRIRSIKKEVQVIEKQRAVVEFEVNE | Stop Gain | 971. |
| | | DDVDAHWYKDGIEINFQVQEG | | |
| TESK2 | XM_005270357.1: p.Arg21* | GGGGGGGGGGGGGGGGGGGGGGGGGG | Stop Gain | 972. |
| | | GGGMGSEKLAVVGSPFWMAPEVLG | | |
| DLG2 | NM_001142700.1: p.Glu47* | GGGMQRPSVSRAENYQLLWDTIASLKQ | Stop Gain | 973. |
| | | CEQAMQHAFIPVNGTEIEYEFEG | | |
| KIAA1324L | NM_152748.3: p.Glu574* | LSSVGSLMNGPSFTSKGTKYFHFFNISLC | Stop Gain | 974. |
| | | GHEGKKMALCTNNITDFTVKG | | |
| ATP13A5 | NM_198505.2: p.Glu752* | LVLKELSEARIRTVMITGDNLQTAITVAK | Stop Gain | 975. |
| | | NSEMIPPGSQVIIVEADEPEG | | |
| PLCG2 | XM_005255986.1: p.Ser443* | FVTSSFPVILSIEEHCSVEQQRHMAKAFK | Stop Gain | 976. |
| | | EVFGDLLLTKPTEASADQLPG | | |
| TRIM32 | NM_001099679.1: p.Arg613* | QISHFFSENEDFRCIAGMCVDARGDLIVA | Stop Gain | 977. |
| | | DSSRKEILHFPKGGGYSVLIG | | |
| ZNF534 | XM_005258526.1: p.Arg608* | GEKPYSCNECGKVFSRNSHLARHRNIHT | Stop Gain | 978. |
| | | GEKPHSCNECGKVFSRNSHLAG | | |
| CASP1 | NM_033295.3: p.Arg58* | KRKLFIRSMGEDNVSWRHPTMGSVFIGR | Stop Gain | 979. |
| | | LIEHMQEYACSCDVEEIFRKVG | | |
| KIF6 | XM_005248905.1: p.Arg623* | TIDDNKQILKQRFSEAKALGESINEARSKI | Stop Gain | 980. |
| | | GISENMAVPLMPDQQEEKLG | | |
| C9orf131 | NM_001040412.1: p.Arg15* | GGGGGGGGGGGGGGGGGGGGGGGGGG | Stop Gain | 981. |
| | | GGGGGGGGGMLRKIQRWWQLGRLG | | |
| KMT2C | XM_005250030.1: p.Arg4197* | AAENISSVVAAFSDLLHVRIPNSYEVSSA | Stop Gain | 982. |
| | | PDVPSMGLVSSHRINPGLEYG | | |
| SEC61G | NM_001012456.1: p.Glu32* | GGGGGGGGGGGGGGGGGGMDQVMQF | Stop Gain | 983. |
| | | VEPSRQFVKDSIRLVKRCTKPDRKG | | |
| JARID2 | NM_004973.3: p.Arg788* | GHTENDHHKFHPLPRFEPKNGLIHGVAP | Stop Gain | 984. |
| | | RNGFRSKLKEVGQAQLKTGRRG | | |
| DCN | NM_133503.2: p.Arg133* | TLLDLQNNKITEIKDGDFKNLKNLHALIL | Stop Gain | 985. |
| | | VNNKISKVSPGAFTPLVKLEG | | |
| OSBPL6 | NM_145739.2: p.Arg428* | QEEFCLIAQKVHSLLKSAFNSIAIEKEKLK | Stop Gain | 986. |
| | | QMVSEQDHSKGHSTQMARLG | | |
| HOOK3 | NM_032410.3: p.Arg603* | KLHEANNELQKKRAIIEDLEPRFNNSSLK | Stop Gain | 987. |
| | | IEELQEALRKKEEEMKQMEEG | | |
| CCDC85A | XM_005264127.1: p.Glu315* | GTPDRPKALKGPSPEHHKPLCKGSPEQQ | Stop Gain | 988. |
| | | RHPHPGSSPETLPKHVLSGSPG | | |
| SMAP2 | XM_005271119.1: p.Arg56* | PFNQWREKDEFDEFIASMAITLLKILSHSE | Stop Gain | 989. |
| | | ATHWSEHCCIWRVRCHFGPG | | |
| DCLRE1A | NM_001271816.1: p.Arg347* | ISYSPLQSDEDTHDIDEKPDDSQEQLFFTE | Stop Gain | 990. |
| | | SSKDGSLEEDDDSCGFFKKG | | |
| TRIM6 | NM_058166.4: p.Arg10* | GGGGGGGGGGGGGGGGGGGGGGGGGG | Stop Gain | 991. |
| | | GGGGGGGGGGGGGGMTSPVLVDIG | | |
| IFT57 | NM_018010.3: p.Lys407* | QEMEEKGSSMTDGAPLVKIKQSLTKLKQ | Stop Gain | 992. |
| | | ETVEMDIRIGIVEHTLLQSKLG | | |
| SLCO4C1 | NM_180991.4: p.Glu553* | NCNCSRSYYYPVCGDGVQYFSPCFAGCS | Stop Gain | 993. |
| | | NPVAHRKPKVYYNCSCIERKTG | | |
| RFX5 | XM_005245408.1: p.Arg149* | LEEHTDTCLPKQSVYDAYRKYCESLACC | Stop Gain | 994. |
| | | RPLSTANFGKIIREIFPDIKAG | | |
| NTS | NM_006183.4: p.Glu77* | EEMKALEADFLTNMHTSKISKAHVPSWK | Stop Gain | 995. |
| | | MTLLNVCSLVNNLNSPAEETGG | | |
| DMXL1 | XM_005271913.1: p.Glu220* | VHLMKFSPDGEFFATAGKDDCLLKVWY | Stop Gain | 996. |
| | | NVENWRTAVTSPDGSSEKQSQGG | | |
| IPO8 | NM_006390.3: p.Glu364* | KEYVAPRVLQQAFNYLNQGVVHSITWK | Stop Gain | 997. |
| | | QMKPHIQNISEDVIFSVMCYKDG | | |
| VPS13C | NM_017684.4: p.Glu45* | GGGGGMVLESVVADLLNRFLGDYVENL | Stop Gain | 998. |
| | | NKSQLKLGIWGGNVALDNLQIKG | | |
| LSAMP | NM_002338.3: p.Arg233* | ILGITREQSGKYECKAANEVSSADVKQV | Stop Gain | 999. |
| | | KVTVNYPPTITESKSNEATTGG | | |
| CEP112 | XM_005257123.1: p.Glu829* | TISSLKEENSQQQLAAERRLQDVRQKFE | Stop Gain | 1000. |
| | | DEKKQLIRDNDQAIKVLQDELG | | |
| KMT2C | XM_005250030.1: p.Cys371* | SHIFLLCPEHIDQAPERSKEDANCAVCDS | Stop Gain | 1001. |
| | | PGDLLDQFFCTTCGQHYHGMG | | |
| GEN1 | XM_005262612.1: p.Arg401* | DLLLFQRFTLEKMEWPNHYACEKLLVLL | Stop Gain | 1002. |
| | | THYDMIERKLGSRNSNQLQPIG | | |
| FUT5 | NM_002034.2: p.Trp145* | EMVPGAADCNITADSSVYPQADAVIVHH | Stop Gain | 1003. |
| | | WDIMYNPSANLPPPTRPQGQRG | | |
| NME8 | NM_016616.4: p.Gln99* | RKLKNELNEDEILHFAVAEADNIVTLQPF | Stop Gain | 1004 |
| | | RDKCEPVFLFSVNGKIIEKIG | | |
| LRPPRC | NM_133259.3: p.Glu467* | NKTDLAKALMKAVKEEGFPIRPHYFWPL | Stop Gain | 1005. |
| | | LVGRRKEKNVQGIIEILKGMQG | | |
| MRPS5 | NM_031902.3: p.Arg191* | PGLNVPLMKNGAVQTIAQRSKEEQEKVE | Stop Gain | 1006. |
| | | ADMIQQREEWDRKKKMKVKREG | | |
| CNTROB | XM_005256437.1: p.Glu461* | VRRLEGELDTARRERDALQLEMSLVQAR | Stop Gain | 1007. |
| | | YESQRIQLESELAVQLEQRVTG | | |
| C10orf71 | NM_001135196.1: p.Glu226* | APLPENSVNFCFDSAFLTVRRVPAEVSNT | Stop Gain | 1008. |
| | | HQNSYQPGRKHGEQESSKNPG | | |
| TTN | NM_133437.3: p.Arg26779* | VRTHAEIKAFSTQMSINEGQRLVLKANIA | Stop Gain | 1009. |
| | | GATDVKWVLNGVELTNSEEYG | | |
| KMT2C | XM_005250030.1: p.Arg3508* | LPCDFMQPLGPLQQSPQHQQQMGQVLQ | Stop Gain | 1010. |
| | | QQNIQQGSINSPSTQTFMQTNEG | | |
| ROCK1 | NM_005406.2: p.Glu549* | RKAEQENEKRRNVENEVSTLKDQLEDLK | Stop Gain | 1011. |
| | | KVSQNSQLANEKLSQLQKQLEG | | |
| BCOR | XM_005272616.1: p.Arg342* | VSPGNPVDSHAYPHIQNSKQPRVPSAKA | Stop Gain | 1012. |
| | | VTSGLPGDTALLLPPSPRPSPG | | |
| ZNF750 | NM_024702.2: p.Met1? | GGGGGGGGGGGGGGGGGGGGGGGGG | Start Loss | 1013. |
| | | MKYGLCKNSITLVSEQDRVPKCPKS | | |
| MYO16 | NM_001198950.1: p.Trp1145* | FRYGYPVRLSFSDFLSRYKPLADTFLREK | Stop Gain | 1014. |
| | | KEQSAAERCRLVLQQCKLQGG | | |
| SPATA17 | NM_138796.2: p.Glu321* | KLAREELRREEWLQNVNDNMFLPFSSYH | Stop Gain | 1015. |
| | | KNEKYIPSMHLSSKYGPISYKG | | |
| ZFHX3 | XM_005255957.1: p.Arg1438* | QLPVSDRHVYKYRCNQCSLAFKTIEKLQ | Stop Gain | 1016. |
| | | LHSQYHVIRAATMCCLCQRSFG | | |
| ATXN2 | XM_005253926.1: p.Gln375* | KSTLNPNAKEFNPRSFSQPKPSTTPTSPRP | Stop Gain | 1017. |
| | | QAQPSPSMVGHQQPTPVYTG | | |
| HNRNPH3 | NM_012207.2: p.Gly178* | RGSMYDRMRRGGDGYDGGYGGFDDYG | Stop Gain | 1018. |
| | | GYNNYGYGNDGFDDRMRDGRGMGG | | |
| ARRDC3 | NM_020801.2: p.Glu261* | AEIENCSSRMVVPKAAIYQTQAFYAKGK | Stop Gain | 1019. |
| | | MKEVKQLVANLRGESLSSGKTG | | |
| DST | XM_005249325.1: p.Glu3410* | KMMLATEETSPDLVGIKRDLEALSKQCN | Stop Gain | 1020. |
| | | KLLDRAQAREEQVEGTIKRLEG | | |
| ABCA8 | XM_005256939.1: p.Arg430* | YDLNSNAFPHPSDGSNLIVATNFMLAFD | Stop Gain | 1021. |
| | | TCLYLALAIYFEKILPNEYGHG | | |
| SHANK3 | NM_033517.1: p.Gly736* | SSRNLPPFGEEKGRSWTRCWQPPQSQRC | Stop Gain | 1022. |
| | | GQTSQTQTPEPPPSNRGPPVGG | | |
| PTPRR | NM_001207016.1: p.Glu47* | GGGMNQKNVLQGQHEADKIWSKEGFY | Stop Gain | 1023. |
| | | AVVIFLSIFVIIVTCLMILYRLKG | | |
| WDR4 | NM_001260476.1: p.Trp178* | ARRQQLVYRQQLAFQHQVWDVAFEETQ | Stop Gain | 1024. |
| | | GLWVLQDCQEAPLVLYRPVGDQG | | |
| SLCO1B7 | NM_001009562.4: p.Arg533* | TRKSYVYFVIQVLDAFLCAVGLTSYSVL | Stop Gain | 1025. |
| | | VIRIVQPELKALAIGFHSMIMG | | |
| KMT2C | XM_005250030.1: p.Arg908* | WSPDISEGREIFKPRQLPGSAIWSIKVGRG | Stop Gain | 1026 |
| | | SGFPGKRRPRGAGLSGRGGG | | |
| CTNND1 | XM_005273796.1: p.Arg497* | SEDTVISILNTINEVIAENLEAAKKLRETQ | Stop Gain | 1027. |
| | | GIEKLVLINKSGNRSEKEVG | | |
| POLQ | NM_199420.3: p.Gln578* | GSMIRAILEIIVGGVASTSQDMHTYAACT | Stop Gain | 1028. |
| | | FLAASMKEGKQGIQRNQESVG | | |
| P2RX6 | XM_005261819.1: p.Arg376* | SSGSSPRPSHWAPGQLGWAWSPFSVTCY | Stop Gain | 1029. |
| | | CCMWIEKPISTGGQSMRRPRPG | | |
| KLHL17 | NM_198317.2: p.Arg477* | CLGVAALHGLLYSAGGYDGASCLNSAE | Stop Gain | 1030. |
| | | RYDPLTGTWTSVAAMSTRRRYVG | | |
| IMPG1 | NM_001563.2: p.Arg59* | FVFWIFLQVQGTKDISINIYHSETKDIDNP | Stop Gain | 1031. |
| | | PRNETTESTEKMYKMSTMRG | | |
| FAM13B | XM_005272009.1: p.Met1? | GGGGGGGGGGGGGGGGGGGGGGGGG | Start Loss | 1032. |
| | | MNHHPLEEDCPPVLSHRSLDFGQSQ | | |
| PTPN3 | NM_001145371.1: p.Arg499* | LSLIVMLTTLTERGRTKCHQYWPDPPDV | Stop Gain | 1033. |
| | | MNHGGFHIQCQSEDCTIAYVSG | | |
| TIMELESS | NM_003920.3: p.Arg1028* | EEDSEEEEEGGSEAEQVQGSLVLSNENL | Stop Gain | 1034. |
| | | GQSLHQEGFSIPLLWLQNCLIG | | |
| ITGA8 | XM_005252633.1: p.Arg694* | HQVIIGDENHLMLIINARNEGEGAYEAEL | Stop Gain | 1035. |
| | | FVMIPEEADYVGIERNNKGFG | | |
| PTER | NM_001001484.2: p.Arg214* | GIIGEIGCSWPLTESERKVLQATAHAQAQ | Stop Gain | 1036. |
| | | LGCPVIIHPGRSSRAPFQIIG | | |
| FAM208A | XM_005265000.1: p.Glu683* | PLSDYEGQEEEMNGTKMKFGKRNNSRG | Stop Gain | 1037. |
| | | EAIISGKQRSSHSLDYDKDRVKG | | |
| COL11A1 | NM_080629.2: p.Tyr235* | TTKPLDRSERAIVDTNGITVFGTRILDEEV | Stop Gain | 1038. |
| | | FEGDIQQFLITGDPKAAYDG | | |
| LCA5L | NM_152505.3: p.Arg142* | KEKKKYNVSKISQSKGQKEISVEKKHTW | Stop Gain | 1039. |
| | | NASLFNSQIHMIAQRRDAMAHG | | |
| DNAH3 | NM_017539.1: p.Glu1489* | KDLAKALAKQCVVFNCSDGLDYKAMG | Stop Gain | 1040. |
| | | KFFKGLAQAGAWACFDEFNRIEVG | | |
| DNAJC2 | XM_005250269.1: p.Arg9* | GGGGGGGGGGGGGGGGGGGGGGGGGG | Stop Gain | 1041. |
| | | GGGGGGGGGGGGGGGMLSDPVKRG | | |
| CNTNAP5 | NM_130773.3: p.Gln224* | SYKSDVADFDGRSSLLYRFNQKLMSTLK | Stop Gain | 1042. |
| | | DVISLKFKSMQGDGVLFHGEGG | | |
| CACNA2D3 | XM_005265318.1: p.Cys680* | EGLHDLEHPDVSLADEWSYCNTDLHPEH | Stop Gain | 1043. |
| | | RHLSQLEAIKLYLKGKEPLLQG | | |

TABLE 4
Structural Variants - Gene Fusions

| | Fusion | | Peptide | SEQ ID |
|---|---|---|---|---|
| Genes (Transcript IDs) | Junctions | Peptide Sequence | Class | NO: |
| TMPRSS2: ERG | 42870046, | MALNSMVGSPDTVGMNYGSYMEEKHMPPPN | In-Frame | 1044. |
| (ENST00000332149: | 39846044 | MTTNERRVIVPADPTLWSTD | Junction | |
| ENST00000398897) | | | | |
| TMPRSS2: ERG | 42878372, | MPPAPPGGESGCEERGAADGGQPRHRWDELR | Frameshift | 1045. |
| (ENST00000398585: | 39795483 | QLHGGEAHATPKHDHERAQ | Junction | |
| ENST00000453032) | | | | |
| TMPRSS2: ERG | 42878372, | RWDELRQLHGGEAHATPKHDHERAQSYRAS | Frameshift | 1046. |
| (ENST00000398585: | 39795483 | RSYAMEYRPCAAVAGVGGER | Downstream- | |
| ENST00000453032) | | | 1 | |
| TMPRSS2: ERG | 42878372, | SYRASRSYAMEYRPCAAVAGVGGERIWPSRR | Frameshift | 1047. |
| (ENST00000398585: | 39795483 | QHLVIPEHRWEGTVQDDQG | Downstream- | |
| ENST00000453032) | | | 2 | |
| TMPRSS2: ERG | 42878372, | IWPSRRQHLVIPEHRWEGTVQDDQGRLPEAHP | Frameshift | 1048. |
| (ENST00000398585: | 39795483 | QLQRRHPSLTSPLPQRDS | Downstream- | |
| ENST00000453032) | | | 3 | |
| TMPRSS2: ERG | 42878372, | HLVIPEHRWEGTVQDDQGRLPEAHPQLQRRH | Frameshift | 1049. |
| (ENST00000398585: | 39795483 | PSLTSPLPQRDSSSTFDFR | Downstream- | |
| ENST00000453032) | | | 4 | |
| TMPRSS2: ERG | 42878372, | GGGGGGGGGMPPAPPGGESGCEERGAAGTLL | In-Frame | 1050. |
| (ENST00000398585: | 39795483 | MNAVWPKAGRWWAAQTPLG | Junction | |
| ENST00000442448) | | | | |
| PCMTD1: ARHGAP26 | 52811490, | GGSGVWLLRTPPSPSAWPARRCPRHSPPNPSP | In-Frame | 1051. |
| (ENST00000544451: | 142586763 | TSPLSPSWPMFSAPSSPM | Junction | |
| ENST00000274498) | | | | |
| C10orf68: CCDC7 | 32912745, | GGGGGGGGGGGGGGGGGGGGMVPASASGE | In-Frame | 1052. |
| (ENST00000375028: | 32832228 | GLRELLLVQEGEVGADMSHEN | Junction | |
| ENST00000277657) | | | | |
| C16orf70: SLC9A5 | 67179322, | EFKIPLAIKKENADGQTETCTTYSKYKASCSR | In-Frame | 1053. |
| (ENST00000219139: | 67296115 | HFISEDAQERQDKEVFQQ | Junction | |
| ENST00000299798) | | | | |
| FGFR3: TACC3 | 1795770, | AVAIVAGASSESLGTEQRVVGRAAERRVTEE | Frameshift | 1054. |
| (ENST00000340107: | 1746245 | VRGGLPGKDHPGGPEVPSP | Junction | |
| ENST00000313288) | | | | |
| FGFR3: TACC3 | 1795770, | RRVTEEVRGGLPGKDHPGGPEVPSPEGPRGGE | Frameshift | 1055. |
| (ENST00000340107: | 1746245 | AAAGKRGDRPGPEQGPGG | Downstream- | |
| ENST00000313288) | | | 1 | |
| FGFR3: TACC3 | 1795770, | EGPRGGEAAAGKRGDRPGPEQGPGGSVGPPG | Frameshift | 1056. |
| (ENST00000340107: | 1746245 | QPEEGADAHPVAGEDSGAE | Downstream- | |
| ENST00000313288) | | | 2 | |
| FGFR3: TACC3 | 1795770, | GPRGGEAAAGKRGDRPGPEQGPGGSVGPPGQ | Frameshift | 1057. |
| (ENST00000340107: | 1746245 | PEEGADAHPVAGEDSGAED | Downstream- | |
| ENST00000313288) | | | 3 | |
| FGFR3: TACC3 | 1808661, | APSQRPTFKQLVEDLDRVLTVTSTDVPGPPPG | In-Frame | 1058. |
| (ENST00000340107: | 1739325 | VPAPGGPPLSTGPIVDLL | Junction | |
| ENST00000313288) | | | | |
| FGFR3: TACC3 | 1808661, | APSQRPTFKQLVEDLDRVLTVTSTDNEESLKK | In-Frame | 1059. |
| (ENST00000340107: | 1746245 | CVEDYLARITQEGQRYQA | Junction | |
| ENST00000313288) | | | | |
| FGFR3: TACC3 | 1810599, | SSGDDSVFAHDLLPPAPPSSGGSRTFKESALRK | In-Frame | 1060. |
| (ENST00000340107: | 1737457 | QSLYLKFDPLLRDSPGR | Junction | |
| ENST00000313288) | | | | |
| UBE2J1: RRAGD | 90062258, | METRYNLKSPVLDFSDPFSTEVKPRILLMGLR | In-Frame | 1061. |
| (ENST00000435041: | 90097309 | RSGKSSIQKVVFHKMSPN | Junction | |
| ENST00000369415) | | | | |
| UBE2J1: RRAGD | 90062258, | GGGGGGGGGGGGGGGGGGGGGMETRYNLK | In-Frame | 1062. |
| (ENST00000435041: | 90097309 | SPDGSPGQAPPHGDQGLQSEY | Junction | |
| ENST00000359203) | | | | |
| ESR1: CCDC170 | 152129499, | QVPYYLENEPSGYTVREAGPPAFYRKCSKENE | In-Frame | 1063. |
| (ENST00000338799: | 151865707 | ENKKQVSKNCRKHEEFLT | Junction | |
| ENST00000367290) | | | | |
| ESR1: CCDC170 | 152129499, | PFLQPHGQQVPYYLENEPSGYTVREAGPPAFY | In-Frame | 1064. |
| (ENST00000338799: | 151859180 | SFKTSDPRCFLKKSPVKN | Junction | |
| ENST00000367290) | | | | |
| ESR1: CCDC170 | 152332929, | MIGLVWRSMEHPGKLLFAPNLLLDRWSPSLK | Frameshift | 1065. |
| (ENST00000338799: | 151907024 | PKYLSLLNSWERSLGFTRK | Junction | |
| ENST00000367290) | | | | |
| ESR1: CCDC170 | 152332929, | PNLLLDRWSPSLKPKYLSLLNSWERSLGFTRK | Frameshift | 1066. |
| (ENST00000338799: | 151907024 | LSRGPRKQRICWRLFRVS | Downstream- | |
| ENST00000367290) | | | 1 | |
| ESR1: CCDC170 | 152332929, | QVPYYLENEPSGYTVREAGPPAFYRWSPSLKP | Frameshift | 1067. |
| (ENST00000406599: | 151907024 | KYLSLLNSWERSLGFTRK | Junction | |
| ENST00000239374) | | | | |
| ESR1: CCDC170 | 152332929, | GPPAFYRWSPSLKPKYLSLLNSWERSLGFTRK | Frameshift | 1068. |
| (ENST00000406599: | 151907024 | LSRGPRKQRICWRLFRVS | Downstream- | |
| ENST00000239374) | | | 1 | |
| LYZ: MS4A7 | 69747534, | GIRAWVAWRNRCQNRDVRQYVQGCGVSSFS | In-Frame | 1069. |
| (ENST00000261267: | 60160259 | STQSQDHIQQVKKSSSRSWI | Junction | |
| ENST00000300184) | | | | |
| LYZ: MS4A7 | 69748014, | LQDNIADAVACAKRVVRDPQGIRAWVAWRN | In-Frame | 1070. |
| (ENST00000261267: | 60156882 | RCQNRDVRQYVQGCGVGRSQ | Junction | |
| ENST00000530234) | | | | |
| KMT2E: LHFPL3 | 104707254, | FTHDDGYMICCDKCSVWQHIDCMGIDRQHIP | In-Frame | 1071. |
| (ENST00000311117: | 104546634 | DTYLCERCQPSSAKPIFSR | Junction | |
| ENST00000424859) | | | | |
| KMT2E: LHFPL3 | 104707254, | ETSSATTISTSEDGSYGTDVTRCICGFTHDDGY | In-Frame | 1072. |
| (ENST00000482560: | 104485829 | MICCDKCSTLESPMMEM | Junction | |
| ENST00000543266) | | | | |
| DEXI: CDH1 | 11027701, | GVLSDPGSGLYDADSELDVFDAYLELFSHAVS | In-Frame | 1073. |
| (ENST00000331808: | 68844100 | SNGNAVEDPMEILITVTD | Junction | |
| ENST00000566612) | | | | |
| CCDC61: PPP5C | 46506759, | DLTHKTGNFKQFNIFCHMLESALTQILVQVKE | In-Frame | 1074. |
| (ENST00000263284: | 46886668 | VLSKLSTLVETTLKETEK | Junction | |
| ENST00000012443) | | | | |
| CCDC61: PPP5C | 46506759, | DLTHKTGNFKQFNIFCHMLESALTQTEKITVC | In-Frame | 1075. |
| (ENST00000536603: | 46886668 | GDTHGQFYDLLNIFELNG | Junction | |
| ENST00000391919) | | | | |
| PML: RARA | 74325616, | VSNTTTAQKRKCSQTQCPRKVIKMESEEGKE | In-Frame | 1076. |
| (ENST00000354026: | 38499056 | ARLARSSPPLRPRAAVLKR | Junction | |
| ENST00000254066) | | | | |
| ZCCHC8: RSRC2 | 122983374, | LRERLRQCEETIEQLRAENQELKRKLNILTRPR | In-Frame | 1077. |
| (ENST00000336229: | 122990253 | VKMKLDVAQLMKKVTRL | Junction | |
| ENST00000331738) | | | | |
| ZCCHC8: RSRC2 | 122983374, | CEETIEQLRAENQELKRKLNILTRPRLERAKKL | In-Frame | 1078. |
| (ENST00000336229: | 122995735 | QEQREKEMVEKQKQQEI | Junction | |
| ENST00000331738) | | | | |
| ZCCHC8: RSRC2 | 122962388, | SSHSSPGSPKKQKNESNSAGSPADMELDSDEG | Frameshift | 1079. |
| (ENST00000543897: | 123006846 | RKHRSRSRSKENQLLLKT | Junction | |
| ENST00000354654) | | | | |
| ZCCHC8: RSRC2 | 122962388, | SPGSPKKQKNESNSAGSPADMELDSDEGRKH | Frameshift | 1080. |
| (ENST00000543897: | 123006846 | RSRSRSKENQLLLKTGKKT | Downstream- | |
| ENST00000354654) | | | 1 | |
| SH3PXD2A: OBFC1 | 105561040, | IINVTWSDSTSQTIYRRYSKFFDLQVNFKKDTT | In-Frame | 1081. |
| (ENST00000369774: | 105652010 | SKAIHSIFKNAIQLLQE | Junction | |
| ENST00000224950) | | | | |
| SH3PXD2A: OBFC1 | 105561040, | ATVVDVEKRRNPSKHYVYIINVTWSDSTSQTI | In-Frame | 1082. |
| (ENST00000369774: | 105664914 | YRRYSKFFDLQWMTALEL | Junction | |
| ENST00000224950) | | | | |
| SH3PXD2A: OBFC1 | 105365554, | LGFQLPKPPEPPSVEVEYYTIAEFQSCISDGISF | In-Frame | 1083. |
| (ENST00000540321: | 105670380 | RGGQKAEVYFCTMDIQ | Junction | |
| ENST00000224950) | | | | |
| PHF20L1: RAD51AP1 | 133845122, | GGGGGGGGGGGGGGGGGGGGMFTEKTTTY | In-Frame | 1084. |
| (ENST00000220847: | 4648072 | QYPRAILSVDLSGENGAACET | Junction | |
| ENST00000442992) | | | | |
| PHF20L1: RAD51AP1 | 133845419, | LERCSSPLTRSSGSSLASRSMFTEKTTTYQYPR | In-Frame | 1085. |
| (ENST00000395390: | 4648072 | AILSVDLSGENGAACET | Junction | |
| ENST00000535558) | | | | |
| PHF20L1: RAD51AP1 | 133845419, | SSLEFLERCSSPLTRSSGSSLASRSMFTEKTTTY | In-Frame | 1086. |
| (ENST00000395386: | 4648072 | QYPRAILSVDLSGENE | Junction | |
| ENST00000543041) | | | | |
| PHF20L1: RAD51AP1 | 133845122, | GGGGGGGGGGGGGGGGGGGGGGGGGMFTE | In-Frame | 1087. |
| (ENST00000220847: | 4648072 | KTTTYQYPRAILSVDLSGENE | Junction | |
| ENST00000543041) | | | | |
| CCDC6: RET | 61665879, | LETYKLKCKALQEENRDLRKASVTIEDPKWEF | In-Frame | 1088. |
| (ENST00000263102: | 43612032 | PRKNLVLGKTLGEGEFGK | Junction | |
| ENST00000340058) | | | | |
| CCDC6: RET | 61665030, | LETYKLKCKALQEENRDLRKASVTIPALAGLH | Frameshift | 1089. |
| (ENST00000263102: | 43610127 | GEPGLRGCLQDPGGSKVG | Junction | |
| ENST00000340058) | | | | |
| CCDC6: RET | 61665030, | PALAGLHGEPGLRGCLQDPGGSKVGIPSEELG | Frameshift | 1090. |
| (ENST00000263102: | 43610127 | SWKNSRRRRIWKSGQGNG | Downstream- | |
| ENST00000340058) | | | 1 | |
| CCDC6: RET | 61665030, | GIPSEELGSWKNSRRRRIWKSGQGNGLPSERQ | Frameshift | 1091. |
| (ENST00000263102: | 43610127 | SRVHHGGREDAERERLPE | Downstream- | |
| ENST00000340058) | | | 2 | |
| CCDC6: RET | 61554231, | TRAGMSYYNSPGLHVQHMGTSHGITEDPKWE | In-Frame | 1092. |
| (ENST00000263102: | 43612032 | FPRKNLVLGKTLGEGEFGK | Junction | |
| ENST00000340058) | | | | |
| CCDC6: RET | 61665880, | LETYKLKCKALQEENRDLRKASVTIWHWAST | Frameshift | 1093. |
| (ENST00000263102: | 43595907 | SRGMLTGRSCMWTRQPARP | Junction | |
| ENST00000340058) | | | | |
| CCDC6: RET | 61665880, | WHWASTSRGMLTGRSCMWTRQPARPCCTSM | Frameshift | 1094. |
| (ENST00000263102: | 43595907 | PCGTPLRRCPASAWASISTA | Downstream- | |
| ENST00000340058) | | | 1 | |
| CCDC6: RET | 61665880, | CCTSMPCGTPLRRCPASAWASISTARTAHGC | Frameshift | 1095. |
| (ENST00000263102: | 43595907 | MRTTGSASRRTPASSTLTG | Downstream- | |
| ENST00000340058) | | | 2 | |
| CCDC6: RET | 61665880, | RTAHGCMRTTGSASRRTPASSTLTGAWTIAPG | Frameshift | 1096. |
| (ENST00000263102: | 43595907 | RSSVSATAAFPCSPSTSR | Downstream- | |
| ENST00000340058) | | | 3 | |
| CCDC6: RET | 61665880, | AWTIAPGRSSVSATAAFPCSPSTSRSSCHPHPF | Frameshift | 1097. |
| (ENST00000263102: | 43595907 | VRASASGQAVPAYTSPS | Downstream- | |
| ENST00000340058) | | | 4 | |
| CCDC6: RET | 61665880, | SSCHPHPFVRASASGQAVPAYTSPSSTPPFQPA | Frameshift | 1098. |
| (ENST00000263102: | 43595907 | APSSPGSSASQRQGPPS | Downstream- | |
| ENST00000340058) | | | 5 | |
| CCDC6: RET | 61665880, | STPPFQPAAPSSPGSSASQRQGPPSAFGRTDPQ | Frameshift | 1099. |
| (ENST00000263102: | 43595907 | APSTSSACCLCSSCAPT | Downstream- | |
| ENST00000340058) | | | 6 | |
| CCDC6: RET | 61665880, | PSAFGRTDPQAPSTSSACCLCSSCAPTSAWPTG | Frameshift | 1100. |
| (ENST00000263102: | 43595907 | SWRVRVCPSAAPRTAWR | Downstream- | |
| ENST00000340058) | | | 7 | |
| CCDC6: RET | 61612311, | KETLAVNYEKEEEFLTNELSRKLMQEDPKWE | In-Frame | 1101. |
| (ENST00000263102: | 43612032 | FPRKNLVLGKTLGEGEFGK | Junction | |
| ENST00000340058) | | | | |
| CCDC6: RET | 61665962, | IVISPFRLEELTNRLASLQQENKVLNRPSLDSM | In-Frame | 1102. |
| (ENST00000263102: | 43610127 | ENQVSVDAFKILEDPKW | Junction | |
| ENST00000340058) | | | | |
| NCOR2: SCARB1 | 124979693, | TWRATEPRYPPHSLSYPVQIARTHTNVRIDPSS | In-Frame | 1103. |
| (ENST00000405201: | 125302253 | LSFNMWKEIPIPFYLSV | Junction | |
| ENST00000415380) | | | | |
| NCOR2: SCARB1 | 124882665, | RKGRITRSMANEANSEEAITPQQSAELASMEL | In-Frame | 1104. |
| (ENST00000405201: | 125263132 | NESSRWTEEEMETAKKGS | Junction | |
| ENST00000415380) | | | | |
| NCOR2: SCARB1 | 124968142, | HSYLPELGKSEMEFIESKRPRLELLPDPLLRPSP | In-Frame | 1105. |
| (ENST00000405201: | 125263132 | LLATGQPAGSEDLTKG | Junction | |
| ENST00000415380) | | | | |
| ERG: MAPK11 | 39947586, | MIQTVPDPAAHIKMGADLNNIVKCQALSDEH | In-Frame | 1106. |
| (ENST00000442448: | 50706378 | VQFLVYQLLRGLKYIHSAG | Junction | |
| ENST00000449719) | | | | |
| ERG: MAPK11 | 39947586, | MIQTVPDPAAHIKFGLRRPAAPEGGGEEAVAP | Frameshift | 1107. |
| (ENST00000398919: | 50706378 | LPVADPRAQNVPGAAAAQ | Junction | |
| ENST00000395764) | | | | |
| ERG: MAPK11 | 39947586, | GEEAVAPLPVADPRAQNVPGAAAAQAPEARE | Frameshift | 1108. |
| (ENST00000398919: | 50706378 | RHRASGRLHAGHVHRGLQR | Downstream- | |
| ENST00000395764) | | | 1 | |
| ERG: MAPK11 | 39947586, | APEARERHRASGRLHAGHVHRGLQRSVLGDH | Frameshift | 1109. |
| (ENST00000398919: | 50706378 | PDGRRPEQHRQVPGAERRA | Downstream- | |
| ENST00000395764) | | | 2 | |
| ERG: MAPK11 | 39947586, | SVLGDHPDGRRPEQHRQVPGAERRARSIPGLP | Frameshift | 1110. |
| (ENST00000398919: | 50706378 | AAARAEVHPLGRDHPPGP | Downstream- | |
| ENST00000395764) | | | 3 | |
| ERG: MAPK11 | 39947586, | PEQHRQVPGAERRARSIPGLPAAARAEVHPLG | Frameshift | 1111. |
| (ENST00000398919: | 50706378 | RDHPPGPEAQQRGCERGL | Downstream- | |
| ENST00000395764) | | | 4 | |
| KIF26B: SMYD3 | 245583047, | PASQGSCVASETSTGTSVAASFFARIFFPGSHP | In-Frame | 1112. |
| (ENST00000407071: | 245927451 | VRGVQVMKVGKLQLHQG | Junction | |
| ENST00000541742) | | | | |
| KIF26B: SMYD3 | 245530669, | IQAHQYLDGTWSLSRTNGVTLYPYQDFFPRKP | Frameshift | 1113. |
| (ENST00000407071: | 245927451 | SRQRGSSDESWQTAATSR | Junction | |
| ENST00000541742) | | | | |
| KIF26B: SMYD3 | 245530669, | SRTNGVTLYPYQDFFPRKPSRQRGSSDESWQT | Frameshift | 1114. |
| (ENST00000407071: | 245927451 | AATSRHVSPSNEESETGF | Downstream- | |
| ENST00000541742) | | | 1 | |
| KIF26B: SMYD3 | 245772830, | VATGSLQDGQSPGVYLCEDPICGTQVICNSFTI | In-Frame | 1115. |
| (ENST00000407071: | 246093239 | CNAEMQEVGVGLYPSIS | Junction | |
| ENST00000541742) | | | | |
| KIF26B: SMYD3 | 245319985, | CNARLVELKRQALRLLLPGPFPGKDADMLTG | In-Frame | 1116. |
| (ENST00000407071: | 246027188 | DEQVWKEVQESLKKIEELK | Junction | |
| 4ENST0000051742) | | | | |
| WASF2: AHDC1 | 27755271, | LCRQTLPSVRSELECVTNITLANVIRQLGSLNA | In-Frame | 1117. |
| (ENST00000430629: | 27879801 | CEAPGPGGDFQCRVQLS | Junction | |
| ENST00000374011) | | | | |
| MPP5: GPHN | 67784196, | GKLWCAKKNKKKRKKVLYNANKNDDGMGR | In-Frame | 1118. |
| (ENST00000555925: | 67555700 | VLAQDVYAKDNLPPFPASVKD | Junction | |
| ENST00000543237) | | | | |
| MPP5: GPHN | 67746254, | KQELDLNSSMRLKKLAQIPPKTGIDNPMFDTE | In-Frame | 1119. |
| (ENST00000555925: | 67646295 | EGIVLESPHYAVKILVIM | Junction | |
| ENST00000543237) | | | | |
| MET: TFG | 116412043, | SARSVSPTTEMVSNESVDYRATFPEGPPSAPA | In-Frame | 1120. |
| (ENST00000397752: | 100455420 | EDRSGTPDSIASSSSAAH | Junction | |
| ENST00000240851) | | | | |
| ETV6: NTRK3 | 12006495, | FSPFFHPGNSIHTQPEVILHQNHEEGPVAVISGE | In-Frame | 1121. |
| (ENST00000396373: | 88576276 | EDSASPLHHINHGITT | Junction | |
| ENST00000355254) | | | | |
| ETV6: NTRK3 | 12006495, | SPFFHPGNSIHTQPEVILHQNHEEDVQHIKRRD | In-Frame | 1122. |
| (ENST00000396373: | 88483984 | IVLKRELGEGAFGKVFL | Junction | |
| ENST00000355254) | | | | |
| AFF1: PTPN13 | 88046295, | KIRLEKEIKSQSSSSSSSHKESSKTNLIQKPQEK | In-Frame | 1123. |
| (ENST00000395146: | 87720254 | KTDDDEITWGNDELPI | Junction | |
| ENST00000316707) | | | | |
| AFF1: PTPN13 | 87869723, | GGGGGGGGGGGGGGGGGGGGGGGGGGGGG | In-Frame | 1124. |
| (ENST00000395146: | 87556405 | GGGGMAFTERVNSSGNRCTCH | Junction | |
| ENST00000502971) | | | | |
| AFF1: PTPN13 | 87928576, | GGGGGGGGGGGGGGGGGGGGGGGGGGGGG | In-Frame | 1125. |
| (ENST00000307808: | 87637682 | GGGGGMAAQSRTSSKIQNLSW | Junction | |
| ENST00000436978) | | | | |
| EML4: ALK | 42492091, | KTADKHKDVIINQAKMSTREKNSQESAAQLP | Frameshift | 1126. |
| (ENST00000401738: | 29446394 | HHLCLPPPLARLQRNPQLQ | Junction | |
| ENST00000431873) | | | | |
| EML4: ALK | 42492091, | STREKNSQESAAQLPHHLCLPPPLARLQRNPQ | Frameshift | 1127. |
| (ENST00000401738: | 29446394 | LQRSLFESLEGRPWKGDT | Downstream- | |
| ENST00000431873) | | | 1 | |
| EML4: ALK | 42492091, | IPSTPKLIPKVTKTADKHKDVIINQVYRRKHQE | In-Frame | 1128. |
| (ENST00000402711: | 29446394 | LQAMQMELQSPEYKLSK | Junction | |
| ENST00000389048) | | | | |
| EML4: ALK | 42532902, | RLEWTRLVDEPGHCADFHPSGTVVAIGTHSGS | In-Frame | 1129. |
| (ENST00000402711: | 29446394 | VPPEAPGAASHADGAAEP | Junction | |
| ENST00000389048) | | | | |
| EML4: ALK | 42528532, | LLTGGGKDRKIILWDHDLNPEREIERAQPSCPT | Frameshift | 1130. |
| (ENST00000401738: | 29446382 | TSAYHLLWQGCKETHSC | Junction | |
| ENST00000431873) | | | | |
| EML4: ALK | 42528532, | DRKIILWDHDLNPEREIERAQPSCPTTSAYHLL | Frameshift | 1131. |
| (ENST00000401738: | 29446382 | WQGCKETHSCRDLCSSP | Downstream- | |
| ENST00000431873) | | | 1 | |
| EML4: ALK | 42522655, | TGDSGGVMLIWSKTTVEPTPGKGPKRAQPSCP | Frameshift | 1132. |
| (ENST00000401738: | 29446393 | TTSAYHLLWQGCKETHSC | Junction | |
| ENST00000431873) | | | | |
| EML4: ALK | 42522655, | MLIWSKTTVEPTPGKGPKRAQPSCPTTSAYHL | Frameshift | 1133. |
| (ENST00000401738: | 29446393 | LWQGCKETHSCRDLCSSP | Downstream- | |
| ENST00000431873) | | | 1 | |
| F11R: USF1 | 160990800, | GGGGGGGGGGGGGGGGGGGGGMGTKAQVE | In-Frame | 1134. |
| (ENST00000537746: | 161013150 | RKLLCLFILAILLYVQGDPGV | Junction | |
| ENST00000435396) | | | | |
| F11R: USF1 | 160990800, | GGGGGGGGGGGGGGGGGGGGGMGTKAQVE | In-Frame | 1135. |
| (ENST00000537746: | 161013150 | RKLLCLFILAILLYEGAAENS | Junction | |
| ENST00000473969) | | | | |
| TPM4: ALK | 16204563, | KEAETRAEFAERTVAKLEKTIDDLEVYRRKH | In-Frame | 1136. |
| (ENST00000344824: | 29446402 | QELQAMQMELQSPEYKLSK | Junction | |
| ENST00000389048) | | | | |
| TPM4: ALK | 16204563, | EAETRAEFAERTVAKLEKTIDDLEESAAQLPH | Frameshift | 1137. |
| (ENST00000538887: | 29446402 | HLCLPPPLARLQRNPQLQ | Junction | |
| ENST00000431873) | | | | |
| TPM4: ALK | 16204563, | EKTIDDLEESAAQLPHHLCLPPPLARLQRNPQL | Frameshift | 1138. |
| (ENST00000538887: | 29446402 | QRSLFESLEGRPWKGDT | Downstream- | |
| ENST00000431873) | | | 1 | |
| KIF5B: RET | 32307243, | VAKELQTLHNLRKLFVQDLATRVKKEDPKWE | In-Frame | 1139. |
| (ENST00000302418: | 43612030 | FPRKNLVLGKTLGEGEFGK | Junction | |
| ENST00000340058) | | | | |
| KIF5B: RET | 32306979, | GSAAQKQKISFLENNLEQLTKVHKQEDPKWE | In-Frame | 1140. |
| (ENST00000302418: | 43612030 | FPRKNLVLGKTLGEGEFGK | Junction | |
| ENST00000340058) | | | | |
| NCOA4: RET | 51582272, | MAHASSANIGPFLEKRGCISMPEQEDPKWEFP | In-Frame | 1141. |
| (ENST00000414907: | 43612031 | RKNLVLGKTLGEGEFGKV | Junction | |
| ENST00000340058) | | | | |
| NCOA4: RET | 51582272, | LMAHASSANIGPFLEKRGCISMPEQEDPKWEF | In-Frame | 1142. |
| (ENST00000443446: | 43612031 | PRKNLVLGKTLGEGEFGK | Junction | |
| ENST00000355710) | | | | |
| CD74: ROS1 | 149784243, | WMHHWLLFEMSRHSLEQKPTDAPPKDDFWIP | In-Frame | 1143. |
| (ENST00000353334: | 117645578 | ETSFILTIIVGIFLVVTIP | Junction | |
| ENST00000368508) | | | | |
| CD74: ROS1 | 149784242, | PLLMQALPMGALPQGPMQNATKYGNMTEDH | In-Frame | 1144. |
| (ENST00000524315: | 117645578 | VMHLLQMIFGYQKQVSYLLL | Junction | |
| ENST00000368508) | | | | |
| COG3: PSMB7 | 46039345, | PLTDRQTDSVLELKAAAENLPVPAEEEEAKNL | In-Frame | 1145. |
| (ENST00000349995: | 127119194 | VSEAIAAGIFNDLGSGSN | Junction | |
| ENST00000259457) | | | | |
| CCDC112: FN1 | 114611702, | LAKIHNNVKKLQHQLKDVKPTPDFVEKLREM | In-Frame | 1146. |
| (ENST00000395557: | 216230296 | MEEIENAINTFKEEEKMAR | Junction | |
| ENST00000323926) | | | | |
| SLC34A2: ROS1 | 25665952, | ILLLGFLYFFVCSLDILSSAFQLVGDDFWIPETS | In-Frame | 1147. |
| (ENST00000503434: | 117645580 | FILTIIVGIFLVVTIP | Junction | |
| ENST00000368508) | | | | |
| SLC34A2: ROS1 | 25678324, | AQEGQDVPVKAPETFDNITISREAQDDFWIPET | In-Frame | 1148. |
| (ENST00000503434: | 117645578 | SFILTIIVGIFLVVTIP | Junction | |
| ENST00000368508) | | | | |
| TPM3: NTRK1 | 154142876, | KEAETRAEFAERSVAKLEKTIDDLEGPAVLAP | In-Frame | 1149. |
| (ENST00000368533: | 156845312 | EDGLAMSLHFMTLGGSSL | Junction | |
| ENST00000392302) | | | | |
| TPM3: NTRK1 | 154142875, | IKILTDKLKEAETRAEFAERSVAKLEKTIDDLE | In-Frame | 1150. |
| (ENST00000341485: | 156845311 | GPAVLAPEDGLAMSLHF | Junction | |
| ENST00000497019) | | | | |
| FGFR3: BAIAP2L1 | 1808661, | APSQRPTFKQLVEDLDRVLTVTSTDNVMEQF | In-Frame | 1151. |
| (ENST00000352904: | 97991744 | NPGLRNLINLGKNYEKAVN | Junction | |
| ENST00000005260) | | | | |
| FGFR3: BAIAP2L1 | 1808661, | GVLACRALPEAHLQAAGGGPGPCPYRDVHRQ | In-Frame | 1152. |
| (ENST00000481110: | 97991744 | CYGTVQSWAAKFNKPGEKL | Junction | |
| ENST00000005260) | | | | |
| CCDC47: USP37 | 61838274, | QLRFLKRQDLLNVLARMMRPVSDQVMLTLQ | In-Frame | 1153. |
| (ENST00000582252: | 219418447 | DNSFLSIDKVPSKDAEEMRL | Junction | |
| ENST00000415516) | | | | |
| CCDC47: USP37 | 61838274, | QLRFLKRQDLLNVLARMMRPVSDQVLSHNIK | In-Frame | 1154. |
| (ENST00000582252: | 219418447 | NVVLRPSGAKQSRLMLTLQ | Junction | |
| ENST00000418019) | | | | |
| PAX8: PPARG | 113992971, | PLECPFERQHYPEAYASPSHTKGEQMTMVDT | In-Frame | 1155. |
| (ENST00000397647: | 12421203 | EMPFWPTNFGISSVDLSVM | Junction | |
| ENST00000397010) | | | | |
| PAX8: PPARG | 113992970, | SSSSSTPSSLSSSAFLDLQQVGSGVPPFNAFPH | In-Frame | 1156. |
| (ENST00000429538: | 12393000 | AASVYGQFTGQALLSDG | Junction | |
| ENST00000287820) | | | | |
| FGFR3: TACC3 | 1795770, | AVAIVAGASSESLGTEQRVVGRAAERRVTEE | Frameshift | 1157. |
| (ENST00000340107: | 1746245 | VRGGLPGKDHPGGPEVPSP | Junction | |
| ENST00000313288) | | | | |
| FGFR3: TACC3 | 1795770, | RRVTEEVRGGLPGKDHPGGPEVPSPEGPRGGE | Frameshift | 1158. |
| (ENST00000340107: | 1746245 | AAAGKRGDRPGPEQGPGG | Downstream- | |
| ENST00000313288) | | | 1 | |
| FGFR3: TACC3 | 1795770, | EGPRGGEAAAGKRGDRPGPEQGPGGSVGPPG | Frameshift | 1159. |
| (ENST00000340107: | 1746245 | QPEEGADAHPVAGEDSGAE | Downstream- | |
| ENST00000313288) | | | 2 | |
| FGFR3: TACC3 | 1795770, | GPRGGEAAAGKRGDRPGPEQGPGGSVGPPGQ | Frameshift | 1160. |
| (ENST00000340107: | 1746245 | PEEGADAHPVAGEDSGAED | Downstream- | |
| ENST00000313288) | | | 3 | |
| FGFR3: TACC3 | 1808661, | APSQRPTFKQLVEDLDRVLTVTSTDVPGPPPG | In-Frame | 1161. |
| (ENST00000340107: | 1739325 | VPAPGGPPLSTGPIVDLL | Junction | |
| ENST00000313288) | | | | |
| FGFR3: TACC3 | 1808661, | VHDHAGVLACRALPEAHLQAAGGGPGPCPYR | In-Frame | 1162. |
| (ENST00000481110: | 1741428 | DVHRRKGDTGGEPGAEEQV | Junction | |
| ENST00000313288) | | | | |
| FGFR3: TACC3 | 1803470, | GNYTCVVENKFGSIRQTYTLDVLERRVTEEVR | Frameshift | 1163. |
| (ENST00000340107: | 1746245 | GGLPGKDHPGGPEVPSPE | Junction | |
| ENST00000313288) | | | | |
| FGFR3: TACC3 | 1803470, | RVTEEVRGGLPGKDHPGGPEVPSPEGPRGGEA | Frameshift | 1164. |
| (ENST00000340107: | 1746245 | AAGKRGDRPGPEQGPGGS | Downstream- | |
| ENST00000313288) | | | 1 | |
| CHD6: TFIP11 | 40080504, | LVYCVKHYKGDEKIKSFIWELITPTTYGVWAE | In-Frame | 1165. |
| (ENST00000309279: | 26906092 | RDSDDERPSFGGKRARDY | Junction | |
| ENST00000407690) | | | | |
| DUSP5: PPP1R16A | 112262036, | ESAARVVLTSLLACLPAGPRVYFLKDGRAPG | Frameshift | 1166. |
| (ENST00000369583: | 145722204 | AAGRDAHGGQDEHTGAAEA | Junction | |
| ENST00000435887) | | | | |
| DUSP5: PPP1R16A | 112262036, | PAGPRVYFLKDGRAPGAAGRDAHGGQDEHT | Frameshift | 1167. |
| (ENST00000369583: | 145722204 | GAAEACPEAARPAGEDVGPG | Downstream- | |
| ENST00000435887) | | | 1 | |
| LMNA: NTRK1 | 156100564, | ALSTALSEKRTLEGELHDLRGQVAKVSVAVG | In-Frame | 1168. |
| (ENST00000361308: | 156844698 | LAVFACLFLSTLLLVLNKC | Junction | |
| ENST00000524377) | | | | |
| LMNA: NTRK1 | 156096706, | SREVSGIKAAYEAELGDARKTLDSVAKERAR | In-Frame | 1169. |
| (ENST00000361308: | 156844362 | LQLELSKVREEFKELKARH | Junction | |
| ENST00000524377) | | | | |
| EGFR: SEPT14 | 55268106, | RPKFRELIIEFSKMARDPQRYLVIQLQDKFEHL | In-Frame | 1170. |
| (ENST00000454757: | 55863785 | KMIQQEEIRKLEEEKKQ | Junction | |
| ENST00000388975) | | | | |
| EGFR: SEPT14 | 55268106, | PKFRELIIEFSKMARDPQRYLVIQGLLPFAVVG | In-Frame | 1171. |
| (ENST00000454757: | 55886916 | STDEVKVGKRMVRGRHY | Junction | |
| ENST00000388975) | | | | |
| ZC3HAVI: BRAF | 138758602, | SVFTTKWIWYWKNESGTWIQYGEEKTLGRRD | In-Frame | 1172. |
| (ENST00000464606: | 140481493 | SSDDWEIPDGQITVGQRIG | Junction | |
| ENST00000288602) | | | | |
| BCL2L11: BRAF | 111881716, | PMSCDKSTQTPSPPCQAFNHYLSAMGSTTGLS | In-Frame | 1173. |
| (ENST00000405953: | 140482957 | ATPPASLPGSLTNVKALQ | Junction | |
| ENST00000288602) | | | | |
| MKRN1: BRAF | 140158807, | DLSDSPYSVVCKYFQRGYCIYGDRCRKHLVD | Frameshift | 1174. |
| (ENST00000495305: | 140481493 | GTRVMIGRFLMGRLQWDKE | Junction | |
| ENST00000288602) | | | | |
| MKRN1: BRAF | 140158807, | IYGDRCRKHLVDGTRVMIGRFLMGRLQWDK | Frameshift | 1175. |
| (ENST00000495305: | 140481493 | ELDLDHLEQSTRESGMVMWQ | Downstream- | |
| ENST00000288602) | | | 1 | |
| SGTA: YIPF3 | 2762041, | YKKALELDPDNETYKSNLKIAELKLREAPSPA | In-Frame | 1176. |
| (ENST00000221566: | 43481371 | PGVHDPYQDGQLPPENCR | Junction | |
| ENST00000372422) | | | | |
| RAPGEF6: USP33 | 130897670, | CSFGKQFGGKRGCDCLVLEPSEMIVETKHYLT | In-Frame | 1177. |
| (ENST00000296859: | 78205103 | VNLTTLRVWCYACSKEVF | Junction | |
| ENST00000370793) | | | | |
| DDX39B: ATP6V1G2 | 31498698, | DIERVNIAFNYDMPEDSDTYLHRVAAMGSQG | In-Frame | 1178. |
| (ENST00000417556: | 31513543 | NLSAEVEQATRRQVQGMQS | Junction | |
| ENST00000303892) | | | | |
| DDX39B: ATP6V1G2 | 31498698, | FNYDMPEDSDTYLHRCYPLSPSRWPLQGARC | Frameshift | 1179. |
| (ENST00000376177: | 31513543 | RACRAPSRETESVSWPSFL | Junction | |
| 7ENST0000036151) | | | | |
| DDX39B: ATP6V1G2 | 31498698, | PLSPSRWPLQGARCRACRAPSRETESVSWPSF | Frameshift | 1180. |
| (ENST00000376177: | 31513543 | LAWSATSGPRSTPTTGFL | Downstream- | |
| ENST00000376151) | | | 1 | |
| DDX39B: ATP6V1G2 | 31498698, | FNYDMPEDSDTYLHRCYPLSPSRWPPWAPRG | Frameshift | 1181. |
| (ENST00000376177: | 31513543 | TCLLRWSRLQGARCRACRA | Junction | |
| ENST00000483251) | | | | |
| DDX39B: ATP6V1G2 | 31498698, | PWAPRGTCLLRWSRLQGARCRACRAPSRETE | Frameshift | 1182. |
| (ENST00000376177: | 31513543 | SVSWPSFLAWSATSGPRST | Downstream- | |
| ENST00000483251) | | | 1 | |
| DDX39B: ATP6V1G2 | 31498698, | TCLLRWSRLQGARCRACRAPSRETESVSWPSF | Frameshift | 1183. |
| (ENST00000376177: | 31513543 | LAWSATSGPRSTPTTGFL | Downstream- | |
| ENST00000483251) | | | 2 | |
| DDX39B: ATP6V1G2 | 31498698, | DIERVNIAFNYDMPEDSDTYLHRVAATRRQV | In-Frame | 1184. |
| (ENST00000458640: | 31513543 | QGMQSSQQRNRERVLAQLL | Junction | |
| ENST00000376151) | | | | |
| SND1: BRAF | 127721553, | ASYKPVFVTEITDDLHFYVQDVETGSTTGLSA | In-Frame | 1185. |
| (ENST00000354725: | 140482957 | TPPASLPGSLTNVKALQK | Junction | |
| ENST00000288602) | | | | |
| TMPRSS2: BRAF | 42866282, | PTVYEVHPAQYYPSPVPQYAPRVLTQASNPV | In-Frame | 1186. |
| (ENST00000332149: | 140481493 | VCTQPKSPSGTVCTSKNTW | Junction | |
| ENST00000288602) | | | | |
| ATG7: BRAF | 11468400, | FNSSHSFLEDLTGLTLLHQETQAAEDLIRDQGF | In-Frame | 1187. |
| (ENST00000354956: | 140487384 | RGDGGSTTGLSATPPAS | Junction | |
| ENST00000288602) | | | | |
| AGK: BRAF | 141255367, | NHWKKTTAGLCLLTWGGHWLYGKHWPQILT | In-Frame | 1188. |
| (ENST00000473884: | 140494267 | SPSPSKSIPIPQPFRPADED | Junction | |
| ENST00000288602) | | | | |
| CCNY: BRAF | 35626135, | RPDTDLSREDTGCNLQHISDRENIDGSTTGLSA | In-Frame | 1189. |
| (ENST00000339497: | 140482957 | TPPASLPGSLTNVKALQ | Junction | |
| ENST00000288602) | | | | |
| TAXIBP1: BRAF | 27827222, | LWSPMPEHYVEGSTVNCVLAFQVENKTLGRR | In-Frame | 1190. |
| (ENST00000416801: | 140481493 | DSSDDWEIPDGQITVGQRI | Junction | |
| ENST00000288602) | | | | |
| CUX1: BRAF | 101758553, | QTALEKTRTELFDLKTKYDEETTAKPQILTSPS | In-Frame | 1191. |
| (ENST00000292538: | 140494267 | PSKSIPIPQPFRPADED | Junction | |
| ENST00000288602) | | | | |
| AP3B1: BRAF | 77385217, | TPALSPSLMADLEGLHLSTSSSVISDLIRDQGF | In-Frame | 1192. |
| (ENST00000255194: | 140487384 | RGDGGSTTGLSATPPAS | Junction | |
| ENST00000288602) | | | | |
| AGTRAP: BRAF | 11810243, | RRLTQQRRPQIPLQSQRAGVKMPEGPQILTSPS | In-Frame | 1193. |
| (ENST00000510878: | 140494268 | PSKSIPIPQPFRPADED | Junction | |
| ENST00000288602) | | | | |
| CLEC16A: TXNDC11 | 11076848, | SLPVSLYLLSQVFLIIHHAPLVNSLAEVILNGD | In-Frame | 1194. |
| (ENST00000409790: | 11778101 | LSEMYAKTEQDIQRSSD | Junction | |
| ENST00000356957) | | | | |
| C15orf41: FAM98B | 36872162, | DEIAQCLVSVPPTRQSLRKLKQRFPRYKGPLL | In-Frame | 1195. |
| (ENST00000569302: | 38756233 | EEQALTKAAEGGLSSPEF | Junction | |
| ENST00000397609) | | | | |
| COX15: TRAPPC4 | 101486876, | HLIKEMKPPTSQEEWEAEFQRYQQFPEFKILN | In-Frame | 1196. |
| (ENST00000016171: | 118892467 | HDMTLTEFKLDQVCGSSR | Junction | |
| ENST00000533012) | | | | |
| COX15: TRAPPC4 | 101486876, | LIKEMKPPTSQEEWEAEFQRYQQFPEFKILNH | In-Frame | 1197. |
| (ENST00000016171: | 118892467 | DMTLTEFKLDQVCGSSRS | Junction | |
| ENST00000525303) | | | | |
| COX15: TRAPPC4 | 101486876, | VDWHLIKEMKPPTSQEEWEAEFQRYQQFPEF | In-Frame | 1198. |
| (ENST00000370483: | 118892467 | KILNHDMTLTEFKLNAYQV | Junction | |
| ENST00000359005) | | | | |
| BCR: ABL1 | 23632602, | DDESPGLYGFLNVIVHSATGFKQSSSEKLRVL | In-Frame | 1199. |
| (ENST00000359540: | 133730188 | GYNHNGEWCEAQTKNGQG | Junction | |
| ENST00000318560) | | | | |
| BCR: ABL1 | 23613779, | AEISENLRARSNKDAKDPTTKNSLEKALQRPV | In-Frame | 1200. |
| (ENST00000359540: | 133729451 | ASDFEPQGLSEAARWNSK | Junction | |
| ENST00000318560) | | | | |
| BCR: ABL1 | 23631808, | ELQMLTNSCVKLQTVHSIPLTINKEALRLLREP | Frameshift | 1201. |
| (ENST00000359540: | 133738148 | LQHPGRVGSSSFNGGRR | Junction | |
| ENST00000318560) | | | | |
| BCR: ABL1 | 23631808, | ALRLLREPLQHPGRVGSSSFNGGRRAHHHAPL | Frameshift | 1202. |
| (ENST00000359540: | 133738148 | SSPKAQQAHCLWCVPQLR | Downstream- | |
| ENST00000318560) | | | 1 | |
| BCR: ABL1 | 23631808, | AHHHAPLSSPKAQQAHCLWCVPQLRQVGDG | Frameshift | 1203. |
| (ENST00000359540: | 133738148 | THGHHHEAQAGRGPVRGGVR | Downstream- | |
| ENST00000318560) | | | 2 | |
| BCR: ABL1 | 23631808, | QVGDGTHGHHHEAQAGRGPVRGGVRGRVEE | Frameshift | 1204. |
| (ENST00000359540: | 133738148 | IQPDGGREDLEGGHHGGGRV | Downstream- | |
| ENST00000318560) | | | 3 | |
| BCR: ABL1 | 23631808, | QAGRGPVRGGVRGRVEEIQPDGGREDLEGGH | Frameshift | 1205. |
| (ENST00000359540: | 133738148 | HGGGRVLERSCSHERDQTP | Downstream- | |
| ENST00000318560) | | | 4 | |
| BCR: ABL1 | 23615961, | KHTPASHPDHPLLQDALRISQNFLSSINEEITPR | In-Frame | 1206. |
| (ENST00000359540: | 133729450 | RQSMTVKKGEKPFSGQ | Junction | |
| ENST00000318560) | | | | |
| EWSR1: FLI1 | 29685527, | YPPQTGSYSQAPSQYSQQSSSYGQQNPSYDSV | In-Frame | 1207. |
| (ENST00000332050: | 128664435 | RRGAWGNNMNSGLNKSPP | Junction | |
| ENST00000527786) | | | | |
| EWSR1: FLI1 | 29685527, | RSMSGPDNRGRGRGGFDRGGMSRDPSYDSVR | In-Frame | 1208. |
| (ENST00000331029: | 128664435 | RGAWGNNMNSGLNKSPPLG | Junction | |
| ENST00000281428) | | | | |
| ELK1: FLI1 | 47500631, | WGLRKNKTNMNYDKLSRALRYYYDKSKPN | In-Frame | 1209. |
| (ENST00000247161: | 128680500 | MNYDKLSRALRYYYDKNIMTK | Junction | |
| ENST00000281428) | | | | |
| EWSR1: FLI1 | 29678546, | TSQPQSSTGGYNQPSLGYGQSNYSYPQVPGSY | In-Frame | 1210. |
| (ENST00000332050: | 128675260 | PMQPVTAPPSYPPTRPFL | Junction | |
| ENST00000527786) | | | | |
| EWSR1: FLI1 | 29685527, | YPPQTGSYSQAPSQYSQQSSSYGQQNPSYDSV | In-Frame | 1211. |
| (ENST00000332050: | 128664435 | RRGAWGNNMNSGLNKSPP | Junction | |
| ENST00000527786) | | | | |
| EWSR1: EWSR1 | 29684475, | SSFRQDHPSSMGVYGQESGGFSGPGENRSMS | In-Frame | 1212. |
| (ENST00000414183: | 29684517 | GPDNRGRGRGGFDRGGMSR | Junction | |
| ENST00000331029) | | | | |
| EWSR1: ETV4 | 29683123, | QSSYGQQPPTSYPPQTGSYSQAPSQYSQQSSS | In-Frame | 1213. |
| (ENST00000332035: | 41607549 | YGQQNVPPHRGLLWALSR | Junction | |
| ENST00000586826) | | | | |
| EWSR1: ERG | 29683123, | YPPQTGSYSQAPSQYSQQSSSYGQQNLPYEPP | In-Frame | 1214. |
| (ENST00000414183: | 39764366 | RRSAWTGHGHPTPQSKAA | Junction | |
| ENST00000288319) | | | | |
| EWSR1: ETV1 | 29678546, | TSQPQSSTGGYNQPSLGYGQSNYSYPQVPGSY | In-Frame | 1215. |
| (ENST00000414183: | 14026139 | PMQPVTAPPSYPPTSSGT | Junction | |
| ENST00000430479) | | | | |
| EWSR1: ETV1 | 29678546, | YSYPQVPGSYPMQPVTAPPSYPPTSGFSWPAT | Frameshift | 1216. |
| (ENST00000331029: | 14026139 | ENQERTPQSMFRNQLCLQ | Junction | |
| ENST00000343495) | | | | |
| EWSR1: ETV1 | 29678546, | VPGSYPMQPVTAPPSYPPTSGFSWPATENQER | Frameshift | 1217. |
| (ENST00000331029: | 14026139 | TPQSMFRNQLCLQSRTAL | Downstream- | |
| ENST00000343495) | | | 1 | |
| EWSR1: CREB1 | 29678546, | GGYNQPSLGYGQSNYSYPQVPGSYPMQPVTA | In-Frame | 1218. |
| (ENST00000331029: | 208439995 | PPSYPPTSCHYPGRSNTAG | Junction | |
| ENST00000536726) | | | | |
| DNMT3A: ADCY3 | 25523008, | KEERQEPSTTARKVGRPGRKRKHPPENLMLSI | In-Frame | 1219. |
| (ENST00000264709: | 25065253 | LPKHVADEMLKDMKKDES | Junction | |
| ENST00000260600) | | | | |
| CCDC57: RBFOX3 | 80085568, | LQDMWRLLDLGSSPSGVTSQGDSTPDGPALPP | Frameshift | 1220. |
| (ENST00000392347: | 77478680 | RPVPPSATERHPCRVRPA | Junction | |
| ENST00000583458) | | | | |
| CCDC57: RBFOX3 | 80085568, | DGPALPPRPVPPSATERHPCRVRPAPTAPHAG | Frameshift | 1221. |
| (ENST00000392347: | 77478680 | LLRPDPGPHRAWHDPVHT | Downstream- | |
| ENST00000583458) | | | 1 | |
| CCDC57: RBFOX3 | 80085568, | PTAPHAGLLRPDPGPHRAWHDPVHTSTDPPR | Frameshift | 1222. |
| (ENST00000392347: | 77478680 | AARLRGQHTAHRRDPDSAD | Downstream- | |
| ENST00000583458) | | | 2 | |
| CCDC57: RBFOX3 | 80085568, | STDPPRAARLRGQHTAHRRDPDSADRRGGTD | Frameshift | 1223. |
| (ENST00000392347: | 77478680 | GQPAAPPLRPYREAAAQAA | Downstream- | |
| ENST00000583458) | | | 3 | |
| CCDC57: RBFOX3 | 80085568, | RRGGTDGQPAAPPLRPYREAAAQAATRLQHP | Frameshift | 1224. |
| (ENST00000392347: | 77478680 | LPVQGPRLAANVRAIRKNF | Downstream- | |
| ENST00000583458) | | | 4 | |
| CCDC57: RBFOX3 | 80085568, | GQPAAPPLRPYREAAAQAATRLQHPLPVQGP | Frameshift | 1225. |
| (ENST00000392347: | 77478680 | RLAANVRAIRKNFRRGDHF | Downstream- | |
| ENST00000583458) | | | in 5 | |
| TPM4: ALK | 16204563, | KEAETRAEFAERTVAKLEKTIDDLEVYRRKH | In-Frame | 1226. |
| (ENST00000344824: | 29446402 | QELQAMQMELQSPEYKLSK | Junction | |
| ENST00000389048) | | | | |
| TPM4: ALK | 16204563, | EAETRAEFAERTVAKLEKTIDDLEESAAQLPH | Frameshift | 1227. |
| (ENST00000538887: | 29446402 | HLCLPPPLARLQRNPQLQ | Junction | |
| ENST00000431873) | | | | |
| TPM4: ALK | 16204563, | EKTIDDLEESAAQLPHHLCLPPPLARLQRNPQL | Frameshift | 1228. |
| (ENST00000538887: | 29446402 | QRSLFESLEGRPWKGDT | Downstream- | |
| ENST00000431873) | | | 1 | |
| EML4: ALK | 42492091, | KTADKHKDVIINQAKMSTREKNSQESAAQLP | Frameshift | 1229. |
| (ENST00000401738: | 29446394 | HHLCLPPPLARLQRNPQLQ | Junction | |
| ENST00000431873) | | | | |
| EML4: ALK | 42492091, | STREKNSQESAAQLPHHLCLPPPLARLQRNPQ | Frameshift | 1230. |
| (ENST00000401738: | 29446394 | LQRSLFESLEGRPWKGDT | Downstream- | |
| ENST00000431873) | | | 1 | |
| EML4: ALK | 42492091, | IPSTPKLIPKVTKTADKHKDVIINQVYRRKHQE | In-Frame | 1231. |
| (ENST00000402711: | 29446394 | LQAMQMELQSPEYKLSK | Junction | |
| ENST00000389048) | | | | |
| TFG: ALK | 100455560, | SSSSAAHPPGVQPQQPPYTGAQTQAVYRRKH | In-Frame | 1232. |
| (ENST00000476228: | 29446396 | QELQAMQMELQSPEYKLSK | Junction | |
| ENST00000389048) | | | | |
| TFG: ALK | 100455560, | SSSSAAHPPGVQPQQPPYTGAQTQAESAAQLP | Frameshift | 1233. |
| (ENST00000476228: | 29446396 | HHLCLPPPLARLQRNPQL | Junction | |
| ENST00000431873) | | | | |
| TFG: ALK | 100455560, | YTGAQTQAESAAQLPHHLCLPPPLARLQRNPQ | Frameshift | 1234. |
| (ENST00000476228: | 29446396 | LQRSLFESLEGRPWKGDT | Downstream- | |
| ENST00000431873) | | | 1 | |
| TFG: ALK | 100455560, | AAHPPGVQPQQPPYTGAQTQAGQIEVYRRKH | In-Frame | 1235. |
| (ENST00000490574: | 29446396 | QELQAMQMELQSPEYKLSK | Junction | |
| ENST00000389048) | | | | |
| RRP12: EXOSC1 | 99160062, | SDCTNVTFSKVQRFWESNSAAHKEISLGDAQS | In-Frame | 1236. |
| (ENST00000370992: | 99197507 | NYLLTTAENELGVVVAHS | Junction | |
| ENST00000370886) | | | | |
| RRP12: EXOSC1 | 99160062, | LSDCTNVTFSKVQRFWESNSAAHKEVEIYKSF | In-Frame | 1237. |
| (ENST00000370992: | 99197507 | RPGDIVLAKVISLGDAQS | Junction | |
| ENST00000370885) | | | | |
| RRP12: EXOSC1 | 99160062, | GLSDCTNVTFSKVQRFWESNSAAHKEVSRWF | In-Frame | 1238. |
| (ENST00000315563: | 99197507 | PSAGVRCSALRPTLKNSGK | Junction | |
| ENST00000485122) | | | | |
| HS2ST1: STRIP1 | 87380843, | GGGMGLLRIMMPPKLQLLAVVAFAVAMLFLE | In-Frame | 1239. |
| (ENST00000370551: | 110580513 | NQIQKLEESRSKLDESKML | Junction | |
| ENST00000369796) | | | | |
| HS2ST1: STRIP1 | 87380843, | GLLRIMMPPKLQLLAVVAFAVAMLFLENQIQ | In-Frame | 1240. |
| (ENST00000370551: | 110580513 | KLEESRSKLGLFGVTRPGV | Junction | |
| ENST00000369795) | | | | |
| TMEM107: WRAP53 | 8079518, | SGLVPSRFLTLLAHLVVVITLFWSRVPVLRMV | In-Frame | 1241. |
| (ENST00000316425: | 7604059 | EGDTIYDYCWYSLMSSAQ | Junction | |
| ENST00000498311) | | | | |
| KAT6B: CREBBP | 76785007, | GKKRQTEEEEGKDNHCFKNADPCRNFGSLFD | In-Frame | 1242. |
| (ENST00000372724: | 3901010 | LENDLPDELIPNGGELGLL | Junction | |
| ENST00000262367) | | | | |
| ZNF503: KIAA0895 | 77158084, | ATGPYYSPYALYGQRLTTASALGYQIVVHLTE | In-Frame | 1243. |
| (ENST00000372524: | 36375373 | DLLSRASMTVVNGCPTLT | Junction | |
| ENST00000317020) | | | | |
| EML4: ALK | 42522660, | TGDSGGVMLIWSKTTVEPTPGKGPKESAAQLP | Frameshift | 1244. |
| (ENST00000401738: | 29446396 | HHLCLPPPLARLQRNPQL | Junction | |
| ENST00000431873) | | | | |
| EML4: ALK | 42522660, | PTPGKGPKESAAQLPHHLCLPPPLARLQRNPQ | Frameshift | 1245. |
| (ENST00000401738: | 29446396 | LQRSLFESLEGRPWKGDT | Downstream- | |
| ENST00000431873) | | | 1 | |
| EML4: ALK | 42522660, | TGDSGGVMLIWSKTTVEPTPGKGPKVYRRKH | In-Frame | 1246. |
| (ENST00000402711: | 29446396 | QELQAMQMELQSPEYKLSK | Junction | |
| ENST00000389048) | | | | |
| STRN: ALK | 37143221, | RAKYHKLKYGTELNQGDMKPPSYDSVYRRK | In-Frame | 1247. |
| (ENST00000379213: | 29446394 | HQELQAMQMELQSPEYKLSK | Junction | |
| ENST00000389048) | | | | |
| STRN: ALK | 37143221, | RAKYHKLKYGTELNQGDMKPPSYDSESAAQL | Frameshift | 1248. |
| (ENST00000379213: | 29446394 | PHHLCLPPPLARLQRNPQL | Junction | |
| ENST00000431873) | | | | |
| STRN: ALK | 37143221, | MKPPSYDSESAAQLPHHLCLPPPLARLQRNPQ | Frameshift | 1249. |
| (ENST00000379213: | 29446394 | LQRSLFESLEGRPWKGDT | Downstream- | |
| 3ENST0000041873) | | | 1 | |
| C2orf61: ALK | 47357080, | VPKYASRSCVFRSTVQRFPTTYFIPRAQPSCPT | Frameshift | 1250. |
| (ENST00000294947: | 29754982 | TSAYHLLWQGCKETHSC | Junction | |
| ENST00000431873) | | | | |
| C2orf61: ALK | 47357080, | SCVFRSTVQRFPTTYFIPRAQPSCPTTSAYHLL | Frameshift | 1251. |
| (ENST00000294947: | 29754982 | WQGCKETHSCRDLCSSP | Downstream- | |
| ENST00000431873) | | | 1 | |
| C2orf61: ALK | 47357080, | GQYNVLPAPVPKYASRSCVFRSTVQRFPTTYF | In-Frame | 1252. |
| (ENST00000294947: | 29754982 | IPAPFSFSTPQLTPSTPS | Junction | |
| ENST00000389048) | | | | |
| CDK2: ALK | 56365031, | YGVVYKARNKLTGEVVALKKIRLDTRAQPSC | Frameshift | 1253. |
| (ENST00000555408: | 29448431 | PTTSAYHLLWQGCKETHSC | Junction | |
| ENST00000431873) | | | | |
| CDK2: ALK | 56365031, | RNKLTGEVVALKKIRLDTRAQPSCPTTSAYHL | Frameshift | 1254. |
| (ENST00000555408: | 29448431 | LWQGCKETHSCRDLCSSP | Downstream- | |
| ENST00000431873) | | | 1 | |
| CDK2: ALK | 56365031, | ENFQKVEKIGEGTYGVVYKARNKLTGEVVAL | In-Frame | 1255. |
| (ENST00000555408: | 29448431 | KKIRLDTCHPPRSHTCHSR | Junction | |
| ENST00000389048) | | | | |
| TPM1: ALK | 63354844, | KEAETRAEFAERSVTKLEKSIDDLEVYRRKHQ | In-Frame | 1256. |
| (ENST00000267996: | 29446394 | ELQAMQMELQSPEYKLSK | Junction | |
| ENST00000389048) | | | | |
| TPM1: ALK | 63354844, | EAETRAEFAERSVTKLEKSIDDLEESAAQLPH | Frameshift | 1257. |
| (ENST00000404484: | 29446394 | HLCLPPPLARLQRNPQLQ | Junction | |
| ENST00000431873) | | | | |
| TPM1: ALK | 63354844, | EKSIDDLEESAAQLPHHLCLPPPLARLQRNPQL | Frameshift | 1258. |
| (ENST00000404484: | 29446394 | QRSLFESLEGRPWKGDT | Downstream- | |
| ENST00000431873) | | | 1 | |
| KIF5B: ALK | 32306071, | QQEVDRIKEAVRSKNMARRGHSAQIESAAQL | Frameshift | 1259. |
| (ENST00000302418: | 29446395 | PHHLCLPPPLARLQRNPQL | Junction | |
| ENST00000431873) | | | | |
| KIF5B: ALK | 32306071, | RRGHSAQIESAAQLPHHLCLPPPLARLQRNPQ | Frameshift | 1260. |
| (ENST00000302418: | 29446395 | LQRSLFESLEGRPWKGDT | Downstream- | |
| ENST00000431873) | | | 1 | |
| CLTC: ALK | 57768072, | VDKLDASESLRKEEEQATETQPIVYESAAQLP | Frameshift | 1261. |
| (ENST00000393043: | 29446394 | HHLCLPPPLARLQRNPQL | Junction | |
| ENST00000431873) | | | | |
| CLTC: ALK | 57768072, | TETQPIVYESAAQLPHHLCLPPPLARLQRNPQL | Frameshift | 1262. |
| (ENST00000393043: | 29446394 | QRSLFESLEGRPWKGDT | Downstream- | |
| ENST00000431873) | | | 1 | |
| CLTC: ALK | 57768072, | VDKLDASESLRKEEEQATETQPIVYVYRRKHQ | In-Frame | 1263. |
| (ENST00000269122: | 29446394 | ELQAMQMELQSPEYKLSK | Junction | |
| ENST00000389048) | | | | |
| C2orf44: ALK | 24253802, | VSSLKVFTGLAAPSLDTTGCCNHVDGMACTA | In-Frame | 1264. |
| (ENST00000295148: | 29446394 | GSTRSCKPCRWSCRALSTS | Junction | |
| ENST00000389048) | | | | |
| C2orf44: ALK | 24253802, | LPYVHIIYQIPTGFFSLLTVRALSRRAQPSCPTT | Frameshift | 1265. |
| (ENST00000406895: | 29446394 | SAYHLLWQGCKETHSC | Junction | |
| ENST00000431873) | | | | |
| C2orf44: ALK | 24253802, | YQIPTGFFSLLTVRALSRRAQPSCPTTSAYHLL | Frameshift | 1266. |
| (ENST00000406895: | 29446394 | WQGCKETHSCRDLCSSP | Downstream- | |
| ENST00000431873) | | | 1 | |
| CD274: KANK1 | 5468208, | MMDVKKCGIQDTNSKKQSDTHLEETMAHTT | In-Frame | 1267. |
| (ENST00000381577: | 676890 | KVNGSASGKAGDILSGDQDK | Junction | |
| ENST00000382297) | | | | |
| COL1A2: LTB4R | 94060247, | LDIAPLDIGGADQEFFVDIGPVCFKMNTTSSAA | In-Frame | 1268. |
| (ENST00000297268: | 24783887 | PPSLGVEFISLLAIILL | Junction | |
| ENST00000396789) | | | | |
| VPS53: ZZEF1 | 600658, | IRRLDDNIRTVVRGQTNVGQDGRQAFAQFDA | In-Frame | 1269. |
| (ENST00000437048: | 4027345 | EGDGTVDAENMLEALKNSS | Junction | |
| ENST00000381638) | | | | |
| VPS53: ZZEF1 | 600658, | KIRRLDDNIRTVVRGQTNVGQDGRQAFAQFD | In-Frame | 1270. |
| (ENST00000401468: | 4027345 | AEGDGTVDAENMLEALKNS | Junction | |
| ENST00000381638) | | | | |
| VPS53: ZZEF1 | 600658, | VEYINTLFPTEQSLANIDEVVNKIRPLPSLMLR | Frameshift | 1271. |
| (ENST00000574029: | 4027345 | VMGQLMPRTCWRPSRIP | Junction | |
| ENST00000381638) | | | | |
| VPS53: ZZEF1 | 600658, | PTEQSLANIDEVVNKIRPLPSLMLRVMGQLMP | Frameshift | 1272. |
| (ENST00000574029: | 4027345 | RTCWRPSRIPVELIFRGS | Downstream- | |
| ENST00000381638) | | | 1 | |
| DAPK1: GRIA3 | 90117527, | MTVFRQENVDDYYDTGEELGRIFHPPSDYGSS | Frameshift | 1273. |
| (ENST00000408954: | 122437509 | SAKQLASNSKVCGKHKGR | Junction | |
| ENST00000541091) | | | | |
| DAPK1: GRIA3 | 90117527, | NVDDYYDTGEELGRIFHPPSDYGSSSAKQLAS | Frameshift | 1274. |
| (ENST00000408954: | 122437509 | NSKVCGKHKGRPRIQAHH | Downstream- | |
| ENST00000541091) | | | 1 | |
| TMEM14C: PAK1IP1 | 10725270, | GGGGGGGGGGMQDTGSVVPLHWFGFGYAAL | In-Frame | 1275. |
| (ENST00000541412: | 10709186 | VASGGIIGYVKAESSPIFTL | Junction | |
| ENST00000379568) | | | | |
| ARPCIA: PRKAG1 | 98972236, | ITQVSIYEVDKQDCRKFCTTGIDGAMTIWDFK | In-Frame | 1276. |
| (ENST00000432884: | 49398934 | ARRTQDRNLERGVSPGLL | Junction | |
| ENST00000316299) | | | | |
| ARPCIA: PRKAG1 | 98972236, | RPVCLDYYSLVRLPSVPIITKCTSIRRTGASGA | In-Frame | 1277. |
| (ENST00000441989: | 49398934 | RRTQDRNLERGVSPGLL | Junction | |
| ENST00000548065) | | | | |
| TTLL10: CTAGIB | 1120489, | FTTLKPTDCCRPPPTAALHQLLSPAAFPVDVD | In-Frame | 1278. |
| (ENST00000379290: | 153846155 | HAVLSARVFGSASLRAEA | Junction | |
| ENST00000328435) | | | | |
| TTLL10: CTAG2 | 1120489, | LNRYISDTFWKARGLAKDWVFTTLKPTDCCR | Frameshift | 1279. |
| (ENST00000379289: | 153880541 | PPPTAALHQLLSPAAFPVD | Junction | |
| ENST00000369585) | | | | |
| TTLL10: CTAG2 | 1120489, | FTTLKPTDCCRPPPTAALHQLLSPAAFPVDVD | Frameshift | 1280. |
| (ENST00000379289: | 153880541 | HAVLSARVFGSGSLRAEA | Downstream- | |
| ENST00000369585) | | | 1 | |
| UBTF: MYH9 | 42289083, | IQKHPELNISEEGITKSTLTKAERQLKDKFDGR | In-Frame | 1281. |
| (ENST00000526094: | 36697672 | PTKPPPNSYSLYCAELI | Junction | |
| ENST00000216181) | | | | |
| HAPLN4: MEF2B | 19371622, | DYGRYECEVTNELEDDAGMVKLDLEDGEEK | Frameshift | 1282. |
| (ENST00000291481: | 19261573 | NPDLPHPGPKESAGDVHQAE | Junction | |
| ENST00000424583) | | | | |
| HAPLN4: MEF2B | 19371622, | VTNELEDDAGMVKLDLEDGEEKNPDLPHPGP | Frameshift | 1283. |
| (ENST00000291481: | 19261573 | KESAGDVHQAEVRADEEGL | Downstream- | |
| ENST00000424583) | | | 1 | |
| UBA52: UBA52 | 18685884, | DKEGIPPDQQRLIFAGKQLEDGRTLSDYNIQK | In-Frame | 1284. |
| (ENST00000598780: | 18685951 | ESTLHLVLRLRGGIIEPS | Junction | |
| ENST00000598780) | | | | |
| CTSA: ATP6V0A4 | 44526658, | RSMNSQYLKLLSSQKYQILLYNGDVDMACNF | In-Frame | 1285. |
| (ENST00000191018: | 138406708 | MGDEWFVDSLNQKMEVQRF | Junction | |
| ENST00000353492) | | | | |
| CTSA: ATP6V0A4 | 44527103, | PEYKNNKLFLTGESYAGIYIPTLAVLVMQDPS | In-Frame | 1286. |
| (ENST00000606788: | 138406708 | MNLQVQGAGCGQWTLLLF | Junction | |
| ENST00000393054) | | | | |
| MUC16: SCUBE3 | 8969304, | TQHFYLNFTITNLPYSQDKAQPGTTNYQCGRV | In-Frame | 1287. |
| (ENST00000397910: | 35197380 | CRGQRRLSAELCQHDGQL | Junction | |
| ENST00000274938) | | | | |
| MUC16: RNASEH2B | 9080451, | KMSSQAAQGNSTWPAPAEETGSSPAEYLKDA | In-Frame | 1288. |
| (ENST00000397910: | 51501543 | SKKMKNGLMFVKLVNPCSG | Junction | |
| ENST00000422660) | | | | |
| MUC16: SBNO2 | 8968880, | DALNQLFRNSSIKSYFSDCQVSTFRTPPILRTSP | In-Frame | 1289. |
| (ENST00000397910: | 1127764 | TSPSSPRPWTPCRTSW | Junction | |
| ENST00000361757) | | | | |
| MUC16: THADA | 9064570, | SFSRTSMSGPEQSTMSQDISIGTIPRISASSVLTE | In-Frame | 1290. |
| (ENST00000397910: | 43732874 | SAKMTITTQTGTVGI | Junction | |
| ENST00000415080) | | | | |
| MUC16: DNAJC22 | 9049994, | EMMITTPYVFPDVPETTSSLATSLGLGGGGLG | In-Frame | 1291. |
| (ENST00000397910: | 49742766 | WLWEFWKLPSFVAQANRA | Junction | |
| ENST00000549441) | | | | |
| MUC16: ZSWIM4 | 9012774, | LQYEEDMHHPGSRKFNTTERVLQGLETPSGCT | Frameshift | 1292. |
| (ENST00000397910: | 13936364 | RYWAPSSRTSTLRPCSLS | Junction | |
| ENST00000254323) | | | | |
| MUC16: ZSWIM4 | 9012774, | ETPSGCTRYWAPSSRTSTLRPCSLSWRRTPAR | Frameshift | 1293. |
| (ENST00000397910: | 13936364 | QPPRSAPHQTPRCWASHW | Downstream- | |
| ENST00000254323) | | | 1 | |
| MUC16: ZSWIM4 | 9012774, | CTRYWAPSSRTSTLRPCSLSWRRTPARQPPRS | Frameshift | 1294. |
| (ENST00000397910: | 13936364 | APHQTPRCWASHWSWGCR | Downstream- | |
| ENST00000254323) | | | 2 | |
| MUC16: RARA | 9045564, | AGSLFTPLTTPGMSTLASESVTSRTNGQQQQL | Frameshift | 1295. |
| (ENST00000397910: | 38487109 | LPDTWGRAPQWVPGASLR | Junction | |
| ENST00000394089) | | | | |
| MUC16: RARA | 9045564, | NGQQQQLLPDTWGRAPQWVPGASLRLLLPPY | Frameshift | 1296. |
| (ENST00000397910: | 38487109 | AGWTLPARRSDHSPAPASS | Downstream- | |
| ENST00000394089) | | | 1 | |
| TADA2A: GDPD4 | 35827629, | LEFELRREIKRLQEYRTAGITNFCSGERLKKKN | In-Frame | 1297. |
| (ENST00000490992: | 76938961 | CLKPPALAQILRVEICT | Junction | |
| ENST00000376217) | | | | |
| TADA2A: GDPD4 | 35827629, | LEFELRREIKRLQEYRTAGITNFCSGERLKKKN | Frameshift | 1298. |
| (ENST00000225396: | 76938961 | CLKPPALAQILRVEVRM | Junction | |
| ENST00000315938) | | | | |
| TADA2A: GDPD4 | 35827629, | ELRREIKRLQEYRTAGITNFCSGERLKKKNCL | Frameshift | 1299. |
| (ENST00000225396: | 76938961 | KPPALAQILRVEVRMRKI | Downstream- | |
| ENST00000315938) | | | 1 | |
| GSN: CTNNB1 | 124095016, | GWFLGWDDDYWSVDPLDRAMAELAAMATQ | In-Frame | 1300. |
| (ENST00000373823: | 41240996 | ADLMELDMAMEPDRKAAVSHW | Junction | |
| ENST00000349496) | | | | |
| GSN: CTNNB1 | 124095016, | GWFLGWDDDYWSVDPLDRAMAELAAMELD | In-Frame | 1301. |
| (ENST00000373818: | 41240996 | MAMEPDRKAAVSHWQQQSYLD | Junction | |
| ENST00000453024) | | | | |
| DDX6: FOXR1 | 118651830, | GTQQQAQSMTTTIKPGDDWKKTLKLPPKDLR | In-Frame | 1302. |
| (ENST00000526070: | 118849492 | IKTSLPGINSELLSHQNYP | Junction | |
| ENST00000317011) | | | | |
| ZNF732: DAB1 | 289227, | DLVIYLEQRKEPYKVKIHETVAKHPGQDRSEA | In-Frame | 1303. |
| (ENST00000419098: | 57611102 | TLIKRFKGEGVRYKAKLI | Junction | |
| ENST00000414851) | | | | |
| EML2: DMWD | 46120888, | VTCGQDKLVHLWSSDSHQPLWSRIIEDPARSA | In-Frame | 1304. |
| (ENST00000536630: | 46290129 | GFHPSGSVLAVGTVTGSG | Junction | |
| ENST00000377735) | | | | |
| EML2: DMWD | 46120888, | TPRTPLCLSPAGNLTSTSGPWRGAARLIDKTK | In-Frame | 1305. |
| (ENST00000586195: | 46290129 | VTYLKWLPESESLFLASH | Junction | |
| ENST00000377735) | | | | |
| EML2: DMWD | 46120888, | TCGQDKLVHLWSSDSHQPLWSRIIERLIDKTK | In-Frame | 1306. |
| (ENST00000588308: | 46290129 | VTYLKWLPESESLFLASH | Junction | |
| ENST00000377735) | | | | |
| EML2: DMWD | 46120888, | SRSVTQAGGQWHDLGSLQPPPPGFKRLIDKTK | In-Frame | 1307. |
| (ENST00000399594: | 46290129 | VTYLKWLPESESLFLASH | Junction | |
| ENST00000377735) | | | | |
| TBX3: KRT5 | 115108355, | SELQSIQRLVSGLEAKPDRSRSASPRSCPRCRR | Frameshift | 1308. |
| (ENST00000257566: | 52911682 | MSLTPQWSSPWTTTATW | Junction | |
| ENST00000252242) | | | | |
| TBX3: KRT5 | 115108355, | RSCPRCRRMSLTPQWSSPWTTTATWTWIASSL | Frameshift | 1309. |
| (ENST00000257566: | 52911682 | RSRPSMRRLPTAAGQKPS | Downstream- | |
| ENST00000252242) | | | 1 | |
| TBX3: KRT5 | 115108355, | TWIASSLRSRPSMRRLPTAAGQKPSPGIRPSMR | Frameshift | 1310. |
| (ENST00000257566: | 52911682 | SCSRQLAGMAMTSATPS | Downstream- | |
| ENST00000252242) | | | 2 | |
| TBX3: KRT5 | 115108355, | SLRSRPSMRRLPTAAGQKPSPGIRPSMRSCSRQ | Frameshift | 1311. |
| (ENST00000257566: | 52911682 | LAGMAMTSATPSMRSLR | Downstream- | |
| ENST00000252242) | | | 3 | |
| STYXL1: PPIL2 | 75634641, | RTQKIIWMPQELDAFQPYPIEIVPGKVFVGNFS | In-Frame | 1312. |
| (ENST00000431581: | 22037545 | QACDQMKRRPNRTRLII | Junction | |
| ENST00000456792) | | | | |
| STYXL1: PPIL2 | 75634641, | HVITALRVKKELDAFQPYPIEIVPGKVFVGNFS | In-Frame | 1313. |
| (ENST00000340062: | 22037545 | QACDQMKRRPNRTRLII | Junction | |
| ENST00000492445) | | | | |
| STYXL1: PPIL2 | 75634641, | ESVDLECVKYCVVYDNNSSTLEILLKDDDDDS | In-Frame | 1314. |
| (ENST00000360591: | 22037545 | DSDGDGKGTGCISAIPHR | Junction | |
| ENST00000456792) | | | | |
| GART: FCHO2 | 34887528, | NGPKVLEFNCRFGDPECQVGNPPTSSHLRGLL | Frameshift | 1315. |
| (ENST00000424203: | 72359704 | PDQSLLQANSVGLMKYPG | Junction | |
| ENST00000430046) | | | | |
| GART: FCHO2 | 34887528, | LEFNCRFGDPECQVGNPPTSSHLRGLLPDQSL | Frameshift | 1316. |
| (ENST00000424203: | 72359704 | LQANSVGLMKYPGHSAHL | Downstream- | |
| ENST00000430046) | | | 1 | |
| GART: FCHO2 | 34887528, | FAHITGGGLLENIPRVLPEKLGVDLVPPPRPAS | In-Frame | 1317. |
| (ENST00000381815: | 72359704 | RPKLTSGKLSGINEIPR | Junction | |
| ENST00000430046) | | | | |
| PHF12: CDK12 | 27277083, | CDSCKEGGDLLCCDHCPAAFHLQCCRKSMKS | In-Frame | 1318. |
| (ENST00000583524: | 37627132 | RSRSPAYSRHSSSHSKKKR | Junction | |
| ENST00000430627) | | | | |
| AXIN1: TMEM207 | 354304, | HRLEAVQRTREAEEKLEERLKRVRMLVLSDL | In-Frame | 1319. |
| (ENST00000262320: | 190165616 | PCEEDEMCVNYNDQHPNGW | Junction | |
| ENST00000354905) | | | | |
| EXOC2: GCNT2 | 532469, | FENYIELKADPIVGSLEPGIYAGYFDWKDCLPP | In-Frame | 1320. |
| (ENST00000230449: | 10509087 | TDGRKDFWKQLLVSDPL | Junction | |
| ENST00000410107) | | | | |
| ATAD2B: TP5313 | 24149425, | TRAASCPAAKAGGSGGAGVTLDEARMLAVH | In-Frame | 1321. |
| (ENST00000238789: | 24307730 | FDKPGGPENLYVKEVAKPSP | Junction | |
| ENST00000238721) | | | | |
| TP53: ARHGAP26 | 7571951, | ALPNNTSSSPQPKKKPLDGEYFTLQARGYHHA | Frameshift | 1322. |
| (ENST00000359597: | 142297940 | SFVGRGPEALDGSHGWPG | Junction | |
| ENST00000378004) | | | | |
| TP53: PXDNL | 7577499, | YMCNSSCMGGMNRRPILTIITLEDSRDLRFNRI | In-Frame | 1323. |
| (ENST00000359597: | 52567320 | REIPGSAFKKLKNLNTL | Junction | |
| ENST00000356297) | | | | |
| TP53: ECSIT | 7576853, | ALPNNTSSSPQPKKKPLDGEYFTLQMSWVQA | In-Frame | 1324. |
| (ENST00000445888: | 11630008 | TLLARGLCRAWGGTCGAAL | Junction | |
| ENST00000588998) | | | | |
| TP53: NTRK1 | 7577498, | PYEPPEVGSDCTTIHYNYMCNSSCMGGMNRR | In-Frame | 1325. |
| (ENST00000445888: | 156844174 | PILTIITLEDSSLLLAGGH | Junction | |
| ENST00000524377) | | | | |
| TP53: FXR2 | 7579311, | KTYQGSYGFRLGFLHSGTAKSVTCTGFVKDV | In-Frame | 1326. |
| (ENST00000455263: | 7509467 | HEDSVTIFFENNWQSERQI | Junction | |
| ENST00000250113) | | | | |
| PPP1R12A: MGAT4C | 80239082, | SCGYLDIAEFLIGQGAHVGAVNSEGDTPLDIA | In-Frame | 1327. |
| (ENST00000550107: | 86443501 | EEEAMEELLQNEVNRQDV | Junction | |
| ENST00000552808) | | | | |
| YY1AP1: ARHGEF2 | 155638418, | CKTARQLTVRIKNLNMNRAPDNIIKTREKEKM | In-Frame | 1328. |
| (ENST00000355499: | 155939091 | KEAKDARYTNGHLFTTIS | Junction | |
| ENST00000361247) | | | | |
| YY1AP1: ARHGEF2 | 155638418, | CKTARQLTVRIKNLNMNRAPDNIIKMKEAKD | In-Frame | 1329. |
| (ENST00000407221: | 155939091 | ARYTNGHLFTTISVSGMTM | Junction | |
| ENST00000368316) | | | | |
| KIAA1210: LIG3 | 118215027, | QNPVEPIEPVWFSLARKKAKAWSHMAEITQN | In-Frame | 1330. |
| (ENST00000402510: | 33324802 | SKPDHVLRNEASHKSFGLG | Junction | |
| ENST00000378526) | | | | |
| SRGAP3: LHFPL4 | 9054992, | HINEVIKTIIIHHEAIFPSPRELEGPVYEKCMAG | In-Frame | 1331. |
| (ENST00000383836: | 9547887 | GEEYCSVPRPGLHDLS | Junction | |
| ENST00000287585) | | | | |
| UNC13B: UBE2R2 | 35231216, | FNTYVTLKVQNVKSTTVAVRGDQPSWEQDF | In-Frame | 1332. |
| (ENST00000378496: | 33886879 | MLRILNFLLTTPIHHLPSDS | Junction | |
| ENST00000263228) | | | | |
| GBE1: ZNF385D | 81627076, | RGIQLHKMIRLITHGLGGEGYLNFMDGTAGTP | In-Frame | 1333. |
| (ENST00000489715: | 21478695 | AISTTTTVEIRKSSVMTT | Junction | |
| ENST00000281523) | | | | |
| SIAE: HYLS1 | 124539253, | NNDMVLQKEPAGAVIWGFGTPGATVTVTLRQ | In-Frame | 1334. |
| (ENST00000263593: | 125761319 | GQETIMKKVTSVKDGRTST | Junction | |
| ENST00000356438) | | | | |
| SIAE: HYLS1 | 124539256, | GGGMVLQKEPAGAVIWGFGTPGATVTVTLRQ | In-Frame | 1335. |
| (ENST00000545756: | 125769239 | GQETIMKKVTSVKDGRTST | Junction | |
| ENST00000425380) | | | | |
| COL1A1: MRFAP1 | 48263305, | EYGGQGSDPADVAIQLTFLRLMSTEWRPRRR | Frameshift | 1336. |
| (ENST00000225964: | 6642800 | APSTTSRTRATRPRAGRPR | Junction | |
| ENST00000320912) | | | | |
| COL1A1: MRFAP1 | 48263305, | WRPRRRAPSTTSRTRATRPRAGRPRGARRPRR | Frameshift | 1337. |
| (ENST00000225964: | 6642800 | RPRRLRRWQRCWWSWSGG | Downstream- | |
| ENST00000320912) | | | 1 | |
| PLD5: SPTLC1 | 242655244, | NFYSSVKQQDYSASVWLRRKDKLEHHFWIKS | Frameshift | 1338. |
| (ENST00000536534: | 94802759 | GGGVPFSSLSPTTGREHWV | Junction | |
| ENST00000262554) | | | | |
| PLD5: SPTLC1 | 242655244, | HFWIKSGGGVPFSSLSPTTGREHWVSRARCQT | Frameshift | 1339. |
| (ENST00000536534: | 94802759 | ASGNCRSMHEQKYCINSG | Downstream- | |
| ENST00000262554) | | | 1 | |
| PLD5: SPTLC1 | 242655244, | SRARCQTASGNCRSMHEQKYCINSGALLGER | Frameshift | 1340. |
| (ENST00000536534: | 94802759 | REVSPSSQHSGCGHGGTNR | Downstream- | |
| ENST00000262554) | | | 2 | |
| PLD5: SPTLC1 | 242655244, | YCINSGALLGERREVSPSSQHSGCGHGGTNRG | Frameshift | 1341. |
| (ENST00000536534: | 94802759 | RTGESCVHHQGGSPGRPA | Downstream- | |
| ENST00000262554) | | | 3 | |
| PLAC8: PDS5A | 84011408, | TLCCPHCTLCQIKRDINRRRAMRTFMVVKTF | In-Frame | 1342. |
| (ENST00000311507: | 39971781 | MDMDQDSEDEKQQYLPLAL | Junction | |
| ENST00000303538) | | | | |
| POLR2B: FIP1L1 | 57845170, | MYDADEGFPPPPGAPPPSLIPTIESGHSSGYDS | In-Frame | 1343. |
| (ENST00000314595: | 54308820 | RSARAFPYGNVAFPHLP | Junction | |
| ENST00000358575) | | | | |
| UTRN: TMEM232 | 144876021, | LEDMIIDSLQWDDHREETEELMRKYEARLYIL | In-Frame | 1344. |
| (ENST00000367545: | 110036315 | QQARRDPLTKQISDEYAC | Junction | |
| ENST00000512003) | | | | |
| NKRF: UBE2A | 118726346, | GGMEKILQMAEGIDIGEMPSYDLVLSKPSKGQ | In-Frame | 1345. |
| (ENST00000371527: | 118715470 | KRHLSTCDDVPSKCLCRW | Junction | |
| ENST00000371569) | | | | |
| NKRF: UBE2A | 118726346, | GEMPSYDLVLSKPSKGQKRHLSTCDVYADGSI | In-Frame | 1346. |
| (ENST00000304449: | 118715470 | CLDILQNRWSPTYDVSSI | Junction | |
| ENST00000346330) | | | | |
| FKBP1A: CTDP1 | 1373478, | GGGGGGGGGGGGGGGGGGMGVQVETISPGD | In-Frame | 1347. |
| (ENST00000400137: | 77455225 | GRTFPKRGQTCVVHYTERFW | Junction | |
| ENST00000299543) | | | | |
| FKBP1A: CTDP1 | 1373478, | GGGGGGGGGGGGGGGGGGGGGGGGGGGGG | In-Frame | 1348. |
| (ENST00000439640: | 77455225 | GGGGGMGVQVETISPGDERFW | Junction | |
| ENST00000299543) | | | | |
| ANKH: DNAH5 | 14871461, | THYWPLIRFLVPLGITNIAIDFGEQWLRGAASS | Frameshift | 1349. |
| (ENST00000284268: | 13736041 | TSSLLRCAWLMRCIRLR | Junction | |
| ENST00000265104) | | | | |
| ANKH: DNAH5 | 14871461, | PLGITNIAIDFGEQWLRGAASSTSSLLRCAWL | Frameshift | 1350. |
| (ENST00000284268: | 13736041 | MRCIRLRFASFWAYLTFP | Downstream- | |
| ENST00000265104) | | | 1 | |
| SLC43A2: SLC43A2 | 1478980, | LFLAMMGPLQGDPLWVNVGLLLLSLLGFCLP | In-Frame | 1351. |
| (ENST00000571650: | 1479947 | LYLICYRRQLDCSSRCFWP | Junction | |
| ENST00000382147) | | | | |
| SLC1A6: AKAP8L | 15075131, | VTSHCLQPGHRNMFPPNLVEACFKQLMMEQS | In-Frame | 1352. |
| (ENST00000430939: | 15491423 | KKSSLMVARSILNNKLISK | Junction | |
| ENST00000397410) | | | | |
| SLC1A6: AKAP8L | 15075131, | PTADAFMDLIRNMFPPNLVEACFKQLMMEQS | In-Frame | 1353. |
| (ENST00000598504: | 15491423 | KKSSLMVARSILNNKLISK | Junction | |
| ENST00000595465) | | | | |
| ZNF606: RDH13 | 58491530, | SIFEEEQSHGMKLERYIWDDPWFSRWRSVRR | Frameshift | 1354. |
| (ENST00000341164: | 55579083 | QQRTSAGRPSITMSTPGTW | Junction | |
| ENST00000396247) | | | | |
| ZNF606: RDH13 | 58491530, | RWRSVRRQQRTSAGRPSITMSTPGTWTWLPSS | Frameshift | 1355. |
| (ENST00000341164: | 55579083 | LSESLQQRSLKRRSEWTF | Downstream- | |
| ENST00000396247) | | | 1 | |
| ZNF606: RDH13 | 58491530, | LQGRGRGLHPRRVGAAGPCSEDPVPMEKCEA | In-Frame | 1356. |
| (ENST00000550599: | 55579083 | AAKDIRGETLNHHVNARHL | Junction | |
| ENST00000396247) | | | | |
| LTBP1: UCMA | 33174012, | QGVNVCGGRCCHGWSKAPGSQRCTKQQEER | In-Frame | 1357. |
| (ENST00000404816: | 13264200 | SREAVEQWRQWHYDGLHPSY | Junction | |
| ENST00000463405) | | | | |
| MED20: TLL2 | 41884523, | GAEKQGTFCVDCETYHTAASTLGSQAVFWGD | In-Frame | 1358. |
| (ENST00000265350: | 98240216 | IALDEDDLKLFHIDKARDW | Junction | |
| ENST00000357947) | | | | |
| NCL: ASPH | 232327939, | GGGGGGGGGGGMVKLAKAGKNQGDPKKMA | In-Frame | 1359. |
| (ENST00000322723: | 62559309 | PPPKEVEEDSEDEEMSEENRA | Junction | |
| ENST00000518068) | | | | |
| PANK4: TMEM178B | 2439979, | RAVHTNYHAALRCESLKLAVIKNAWLAERLG | In-Frame | 1360. |
| (ENST00000378466: | 141012933 | GRLFSVIFKYEVPAETCAE | Junction | |
| ENST00000565468) | | | | |
| INPP5A: KIF20B | 134579350, | FDYFNQEVFRDNNGTALLEFDKELSVFKDRL | In-Frame | 1361. |
| (ENST00000368594: | 91512324 | YELDISFPPRIGKMEGKMQ | Junction | |
| ENST00000371728) | | | | |
| CTU2: MLYCD | 88779313, | GEEQPPQPPLDPQNLARPPAPAQTEALSQLFCS | In-Frame | 1362. |
| (ENST00000312060: | 83945823 | VRTLTAKEELLQTLRQS | Junction | |
| ENST00000262430) | | | | |
| CTU2: MLYCD | 88779313, | AFCRCSWRGLGGLRPAPWSGRFLRAAIVKEH | In-Frame | 1363. |
| (ENST00000564105: | 83945823 | PPSETEEKNKITAAIFYSI | Junction | |
| ENST00000262430) | | | | |
| MPC1: PXT1 | 166796294, | GGGGGGGGGGGGGGGGGMAGALVRKAADY | In-Frame | 1364. |
| (ENST00000341756: | 36359651 | VRSKDFRDYLMRIFNRMAEMH | Junction | |
| ENST00000454782) | | | | |
| PPTC7: IGF1 | 111020614, | LLKKGACYGDDACFVARHRSADVLGEDAHH | Frameshift | 1365. |
| (ENST00000354300: | 102869577 | VLLASLLPGAVPAHLHQLCH | Junction | |
| ENST00000337514) | | | | |
| PPTC7: IGF1 | 111020614, | DDACFVARHRSADVLGEDAHHVLLASLLPGA | Frameshift | 1366. |
| (ENST00000354300: | 102869577 | VPAHLHQLCHGWTGDALRG | Downstream- | |
| ENST00000337514) | | | 1 | |
| SHC2: TJP3 | 440862, | YVVRYMGCIEVLRSMRSLDFNTRTQVTRWTA | In-Frame | 1367. |
| (ENST00000264554: | 3750136 | ATPRDSGDRTACEPMNGKP | Junction | |
| ENST00000262968) | | | | |
| COL1A2: C1orf159 | 94056572, | RGPAGPSGPAGKDGRTGHPGTVGPADGAAAP | Frameshift | 1368. |
| (ENST00000297268: | 1044385 | RPPGWPSRGSRQQVHGEHG | Junction | |
| ENST00000437760) | | | | |
| COL1A2: C1orf159 | 94056572, | DGAAAPRPPGWPSRGSRQQVHGEHGPAARVL | Frameshift | 1369. |
| (ENST00000297268: | 1044385 | CGCGGRQRQLPRRKSVWSR | Downstream- | |
| ENST00000437760) | | | 1 | |
| COL1A2: C1orf159 | 94056572, | PAARVLCGCGGRQRQLPRRKSVWSRLLQALE | Frameshift | 1370. |
| (ENST00000297268: | 1044385 | RGRERQLRPLWERNPPSLQ | Downstream- | |
| ENST00000437760) | | | 2 | |
| COL1A2: C1orf159 | 94056572, | VLCGCGGRQRQLPRRKSVWSRLLQALERGRE | Frameshift | 1371. |
| (ENST00000297268: | 1044385 | RQLRPLWERNPPSLQRLRV | Downstream- | |
| ENST00000437760) | | | 3 | |
| PHACTR3: BCAS1 | 58152672, | GGGGGGGGGGGGMRGRGGGRARCPAPLRSL | In-Frame | 1372. |
| (ENST00000359926: | 52675262 | LGAFGARDAAAAARDPAQDG | Junction | |
| ENST00000371440) | | | | |
| PHACTR3: BCAS1 | 58152672, | CPAPLRSLLGAFGARDAAAAARDPAQDALSA | In-Frame | 1373. |
| (ENST00000359926: | 52675262 | CTRTYRRPSRRFIPWISEA | Junction | |
| ENST00000411563) | | | | |
| BCAP31: SMAD2 | 152981024, | NLQNNPGAMEHFHMKLFRAQRNLYIYIGGEV | In-Frame | 1374. |
| (ENST00000458587: | 45372152 | FAECLSDSAIFVQSPNCNQ | Junction | |
| ENST00000586040) | | | | |
| ACAP2: XXYLT1 | 195063200, | VEEATNILTATRKCFRHIALDYVLQVIFHDVA | In-Frame | 1375. |
| (ENST00000326793: | 194947585 | VLTDKLFPIVEAMQKHFS | Junction | |
| ENST00000310380) | | | | |
| ZNF618: PARP4 | 116638693, | MNQPGGAAAPQVTRSYFRILSISQAIPWQQSSS | Frameshift | 1376. |
| (ENST00000288466: | 25027792 | CLPHLPWGTQTSGKHSD | Junction | |
| ENST00000381989) | | | | |
| ZNF618: PARP4 | 116638693, | IPWQQSSSCLPHLPWGTQTSGKHSDILAYCTL | Frameshift | 1377. |
| (ENST00000288466: | 25027792 | LEGHGTSSWCLMGTSRMR | Downstream- | |
| ENST00000381989) | | | 1 | |
| ZNF618: PARP4 | 116638693, | PWQQSSSCLPHLPWGTQTSGKHSDILAYCTLL | Frameshift | 1378. |
| (ENST00000288466: | 25027792 | EGHGTSSWCLMGTSRMRA | Downstream- | |
| ENST00000381989) | | | 2 | |
| CUL4A: TMCO3 | 113909439, | FIFNGEFKHKLFRIKINQIQMKETVTELLDVSM | In-Frame | 1379. |
| (ENST00000326335: | 114193672 | ELGCFLAGALVSSQGPV | Junction | |
| ENST00000434316) | | | | |
| CUL4A: TMCO3 | 113909439, | CGKARVLIKSPKGKEVEDGDKFIFNGEFKHKL | In-Frame | 1380. |
| (ENST00000451881: | 114193672 | FRIKINQIQMKETATEQP | Junction | |
| ENST00000375391) | | | | |
| TP53: NTRK1 | 7571719, | ALPNNTSSSPQPKKKPLDGEYFTLQTLTAHLE | In-Frame | 1381. |
| (ENST00000359597: | 156844174 | TRWRRRTKHLLGSRWLWA | Junction | |
| ENST00000368196) | | | | |
| TP53: NTRK1 | 7571719, | ALPNNTSSSPQPKKKPLDGEYFTLQSPSRRWT | Frameshift | 1382. |
| (ENST00000359597: | 156844174 | LTAHLETRWRRRTKHLLG | Junction | |
| ENST00000524377) | | | | |
| TP53: NTRK1 | 7571719, | SPSRRWTLTAHLETRWRRRTKHLLGSRWLW | Frameshift | 1383. |
| (ENST00000359597: | 156844174 | AWPSLPASSFLRCSLCSTNV | Downstream- | |
| ENST00000524377) | | | 1 | |
| TP53: NTRK1 | 7571719, | SRWLWAWPSLPASSFLRCSLCSTNVDGETSLG | Frameshift | 1384. |
| (ENST00000359597: | 156844174 | STARLCWLQRMGWPCPCI | Downstream- | |
| ENST00000524377) | | | 2 | |
| TP53: RPLPO | 7579312, | KTYQGSYGFRLGFLHSGTAKSVTCTGVRNVA | In-Frame | 1385. |
| (ENST00000445888: | 120635265 | SVCLQIGYPTVASVPHSII | Junction | |
| ENST00000228306) | | | | |
| ARHGAP21-C15orf38: AP3S2 | 24919867, | PAFEAGLCTGDRIIKVNGESVIGKTYSQVIALI | In-Frame | 1386. |
| (ENST00000396432: | 90440031 | QNSQKKFNSRLFERLSI | Junction | |
| ENST00000398333) | | | | |
| NRXN3: FMNL1 | 80287317, | RKNRSTASIQPTSDDLVSSAECSSDDEDFVECE | In-Frame | 1387. |
| (ENST00000554719: | 43320835 | PSTGTTCRLWAWTSWSC | Junction | |
| ENST00000587489) | | | | |
| NRXN3: FMNL1 | 80287317, | RSTASIQPTSDDLVSSAECSSDDEDFVECEPST | In-Frame | 1388. |
| (ENST00000281127: | 43320835 | GRSGTTCRLWAWTSWSC | Junction | |
| ENST00000331495) | | | | |
| USP22: EPN2 | 20931855, | TVSSSAVSQRSIFTSMRRRSGTTWPPPRECPPS | Frameshift | 1389. |
| (ENST00000579645: | 19213198 | WSKPGPRLVEKRSFSCS | Junction | |
| ENST00000395620) | | | | |
| USP22: EPN2 | 20931855, | SAVSQRSIFTSMRRRSGTTWPPPRECPPSWSKP | Frameshift | 1390. |
| (ENST00000579645: | 19213198 | GPRLVEKRSFSCSWHLP | Downstream- | |
| ENST00000395620) | | | 1 | |
| FBLN2: LMCD1 | 13590708, | METSLSLESGHHDVPGPAAVSKRCGMFGMQG | Frameshift | 1391. |
| (ENST00000535798: | 8574423 | DVFGLRATFMEENMQVLQM | Junction | |
| ENST00000157600) | | | | |
| FBLN2: LMCD1 | 13590708, | GHHDVPGPAAVSKRCGMFGMQGDVFGLRAT | Frameshift | 1392. |
| (ENST00000535798: | 8574423 | FMEENMQVLQMQPRGPLPNI | Downstream- | |
| ENST00000157600) | | | 1 | |

TABLE 5
Structural Variants-Alternative Splicing

| Fusion Genes | Fusion | | Peptide | SEQ ID |
|---|---|---|---|---|
| (Transcript IDs) | Junctions | Peptide Sequence | Class | NO: |
| ERG (ENST00000420316) | 55087058, | GTAGAALLALLAALCPASRALEEKKGNYVVT | In-Frame | 1393. |
| (“EGFR vIII”) | 55223523 | DHGSCVRACGADSYEMEED | Junction | |
| ACTG1 (ENST00000575842) | 79478553, | LFSELAEDKENYKKFYEAFSKNLKLMKEILDK | In-Frame | 1394. |
| | 79478348 | KVEKVTISNRLVSSPCCI | Junction | |
| HSP90AB1 (ENST00000371646) | 44219345, | LFSELAEDKENYKKFYEAFSKNLKLMKEILDK | In-Frame | 1395. |
| | 44219969 | KVEKVTISNRLVSSPCCI | Junction | |
| GAPDH (ENST00000396856) | 6646159, | RDPSKIKWGDAGAEYVVESTGVFTTMFVMG | In-Frame | 1396. |
| | 6646325 | VNHEKYDNSLKIISNASCTT | Junction | |
| ACTB (ENST00000331789) | 5567972, | FEQEMATAASSSSLEKSYELPDGQVTTMYPGI | In-Frame | 1397. |
| | 5567711 | ADRMQKEITALAPSTMKI | Junction | |
| HLA-C (ENST00000383329) | 31239437, | GEPRAPWVEQEGPEYWDRETQKYKRQSAYD | In-Frame | 1398. |
| | 31239051 | GKDYIALNEDLRSWTAADTA | Junction | |
| GAPDH (ENST00000396856) | 6646159, | RDPSKIKWGDAGAEYVVESTGVFTTMFVMG | In-Frame | 1399. |
| | 6646325 | VNHEKYDNSLKIISNASCTT | Junction | |
| RPL29 (ENST00000479017) | 52028071, | YESLKGVDPKFLRNMRFAKKHNKKGLKKMQ | In-Frame | 1400. |
| | 52027829 | PQLQFQLRLPNVPRPLQRLQ | Junction | |
| ACTG1 (ENST00000575842) | 79478514, | YASGRTTGIVMDSGDGVTHTVPIYEGYSFTTT | In-Frame | 1401. |
| | 79478426 | AEREIVRDIKEKLCYVAL | Junction | |
| GAPDH (ENST00000396856) | 6646553, | SCTTNCLAPLAKVIHDNFGIVEGLMAAGLSRT | In-Frame | 1402. |
| | 6646817 | SSLPLLALPRLWARSSLS | Junction | |
| IGFBP2 (ENST00000233809) | 217498557, | YTPRCRRWSWARALVRSAGTPSMAPARSRLQ | Frameshift | 1403. |
| | 217498607 | TMAMTTQKEAWWRTTWTAP | Downstream- | |
| | | | 1 | |
| HSP90AB1 (ENST00000371646) | 44219345, | LFSELAEDKENYKKFYEAFSKNLKLMKEILDK | In-Frame | 1404. |
| | 44219969 | KVEKVTISNRLVSSPCCI | Junction | |
| GAPDH (ENST00000396856) | 6646553, | SCTTNCLAPLAKVIHDNFGIVEGLMAAGLSRT | In-Frame | 1405. |
| | 6646817 | SSLPLLALPRLWARSSLS | Junction | |
| GAPDH (ENST00000396856) | 6646159, | RDPSKIKWGDAGAEYVVESTGVFTTMFVMG | In-Frame | 1406. |
| | 6646325 | VNHEKYDNSLKIISNASCTT | Junction | |
| KRAS (ENST00000311936) | 25380168, | RTGEGFLCVFAINNTKSFEDIHHYRTVDTKQA | In-Frame | 1407. |
| | 25378629 | QDLARSYGIPFIETSAKT | Junction | |
| KRAS (ENST00000311936) | 25362745, | ARSYGIPFIETSAKTRQGVDDAFYTLVREIRKH | In-Frame | 1408. |
| | 25360441 | KEKMSKDGKKKKKKSKT | Junction | |
| HRAS (ENST00000397596) | 533457, | LAARTVESRQAQDLARSYGIPYIETSAKTREW | In-Frame | 1409. |
| | 533358 | RMPSTRWCVRSGSTSCGS | Junction | |
| HRAS (ENST00000493230) | 533457, | DLAARTVESRQAQDLARSYGIPYIETSAKTRA | In-Frame | 1410. |
| | 533358 | AALALAPAPGPSGTPRDP | Junction | |
| HRAS (ENST00000397596) | 534212, | GGGMTEYKLVVVGAGGVGKSALTIQLIQNHF | In-Frame | 1411. |
| | 533612 | VDEYDPTIEGADQTGEGLG | Junction | |
| HRAS (ENST00000397596) | 533453, | KRVKDSDDVPMVLVGNKCDLAARTVESRQA | In-Frame | 1412. |
| | 532522 | QDLARSYGIPYIETSAKTRQ | Junction | |
| NRAS (ENST00000369535) | 115256421, | DTAGQEEYSAMRDQYMRTGEGFLCVFAINNS | In-Frame | 1413. |
| | 115251275 | KSFADINLYRVLKMLFTHW | Junction | |
| NRAS (ENST00000369535) | 115256421, | CLLDILDTAGQEEYSAMRDQYMRTGEGFLCV | In-Frame | 1414. |
| | 115252342 | FAINNSKSFADINLYRLSE | Junction | |
| NRAS (ENST00000369535) | 115258671, | GVGKSALTIQLIQNHFVDEYDPTIEGVEDAFY | In-Frame | 1415. |
| | 115251275 | TLVREIRQYRMKKLNSSD | Junction | |
| BRAF (ENST00000288602) | 140549911, | LTQEHIEALLDKFGGEHNPPSIYLEVPARCGVT | In-Frame | 1416. |
| | 140508795 | VRDSLKKALMMRGLIPE | Junction | |
| BRAF (ENST00000288602) | 140487348, | NVHINTIEPVNIDDLIRDQGFRGDGEISRTSAR | In-Frame | 1417. |
| | 140482883 | KEVIFILRRQESNENTW | Junction | |
| BRAF (ENST00000288602) | 140487348, | NVHINTIEPVNIDDLIRDQGFRGDGALQKSPGP | In-Frame | 1418. |
| | 140482891 | QRERKSSSSSEDRNRMK | Junction | |
| COL24A1 (ENST00000436319) | 86289219, | GQQGPPGEPGDQGEQGLKGERGSEGIRGGPG | In-Frame | 1419. |
| | 86252144 | RTGLAGAPGPPGVKGSSGL | Junction | |
| TSEN54 (ENST00000583173) | 73515095, | QEAYQLLLTDHTVTFLQYQVFSHLKSSVLSPY | In-Frame | 1420 |
| | 73517490 | ERQLNLDASVQHLEDGDG | Junction | |
| PTPN3 (ENST00000412145) | 112190901, | SFYPWVNILKISFKRKKFFIHQRQKQAKKLLP | In-Frame | 1421. |
| | 112189303 | QEKNVLSQYWTMGSRNTK | Junction | |
| PPCS (ENST00000372561) | 42922999, | EFTTLADYLHLLQAAAQALNPLGPSAMFYLA | In-Frame | 1422. |
| | 42925274 | AAVSDFYVPVSEMPEHKIQ | Junction | |
| PPCS (ENST00000372562) | 42922999, | GGGGGGGGGGGGGGGGGGGGGGGGGGMFY | In-Frame | 1423. |
| | 42925274 | LAAAVSDFYVPVSEMPEHKIQ | Junction | |
| PPCS (ENST00000372556) | 42922999, | GGMAEMDPVAEFPQPPGAARWAEALLRCFT | In-Frame | 1424. |
| | 42925274 | WLRLCQISMFLSLKCLNTRS | Junction | |
| BCAS4 (ENST00000371608) | 49434819, | EAKEVEETIEGMLLRLEEFCSLADLKSPAPVPV | In-Frame | 1425. |
| | 49493023 | TYELPTLYRTEDYFPVD | Junction | |
| PCMTD1 (ENST00000522514) | 52773405, | LQPGLSFLNLGSGTGYLSTMVGLILAPCAVRN | In-Frame | 1426. |
| | 52733278 | LQDLARIYIRRTLRNFIN | Junction | |
| GBP4 (ENST00000355754) | 89656944, | DNFCSYIFTHAKTKTLREGIIVTGKHAINSGAV | In-Frame | 1427. |
| | 89655971 | PCLENAVTALAQLENPA | Junction | |
| TF (ENST00000402696) | 133494364, | LVEKGDVAFVKHQTVPQNTGGKNPDPWAKN | In-Frame | 1428. |
| | 133494421 | LNEKDYELLCLDGTRKPVEE | Junction | |
| PTEN (ENST00000371953) | 89685314, | TYIYPNIIAMGFPAERLEGVYRNNIDDVVRFLD | In-Frame | 1429. |
| | 89692770 | SKHKNHYKIYNLCTISF | Junction | |
| PTEN (ENST00000371953) | 89653866, | NIIAMGFPAERLEGVYRNNIDDVVRSSVCGLP | Frameshift | 1430. |
| | 89717610 | AKGEDIFLQFRTHTTGRQ | Junction | |
| PTEN (ENST00000371953) | 89653866, | MGFPAERLEGVYRNNIDDVVRSSVCGLPAKG | Frameshift | 1431. |
| | 89717610 | EDIFLQFRTHTTGRQVHVL | Downstream- | |
| | | | 1 | |
| PTEN (ENST00000371953) | 89653866, | EIVSRNKRRYQEDGFDLDLTYIYPNIIAMGFPA | In-Frame | 1432. |
| | 89711875 | ERLEGVYRNNIDDVVRE | Junction | |
| PLS1 (ENST00000337777) | 142388391, | SGYVSDYELQDLFKEASLPLPGYKVREIVEKIL | In-Frame | 1433. |
| | 142389835 | SVADSNKDGKISFEEFV | Junction | |
| PAQR5 (ENST00000395407) | 69677221, | SCVYPLVSSCAHTFSSMSKNARHICYFLDYGA | In-Frame | 1434. |
| | 69689807 | VNLFSLGFLKSRSPDSVR | Junction | |
| KAT2B (ENST00000263754) | 20164296, | GDIPMELINEVMSTITDPAAMLGPEKPNKKIL | In-Frame | 1435. |
| | 20167499 | MWLVGLQNVFSHQLPRMP | Junction | |
| AHNAK2 (ENST00000333244) | 105414933, | DIKGPKLDLKDPKVEVTAPDVEVSLPSVEVDV | In-Frame | 1436. |
| | 105414437 | EAPGAKLDGAWLEGDLSV | Junction | |
| BRD9 (ENST00000435709) | 889702, | FLKLSAENESTPIQQLLEHFLRQLQRPDTVYY | In-Frame | 1437. |
| | 887542 | KLAKKILHAGFKMMSKQA | Junction | |
| TP53 (ENST00000455263) | 7579839, | GGGGGGGGGGGGGGGMEEPQSDPSVEPPLSQ | In-Frame | 1438. |
| | 7579590 | ETFSDLWKLPPCRPKQWMI | Junction | |
| TP53 (ENST00000455263) | 7577019, | RTEEENLRKKGEPHHELPPGSTKRAPLPSQRR | Frameshift | 1439. |
| | 7576907 | NHWMENISPFRCYLTYDG | Junction | |
| TP53 (ENST00000455263) | 7577019, | EENLRKKGEPHHELPPGSTKRAPLPSQRRNHW | Frameshift | 1440. |
| | 7576907 | MENISPFRCYLTYDGVTS | Downstream- | |
| | | | 1 | |
| CAPN8 (ENST00000366872) | 223722681, | PFSRTDIKFDGFNINTCREMISLLDNYSAFWTK | Frameshift | 1441. |
| | 223716825 | TRMAWFSSLWPSGCAAC | Junction | |
| CAPN8 (ENST00000366872) | 223722681, | FSRTDIKFDGFNINTCREMISLLDNYSAFWTKT | Frameshift | 1442. |
| | 223716825 | RMAWFSSLWPSGCAACW | Downstream- | |
| | | | 1 | |
| RBBP4 (ENST00000373493) | 33134455, | TKHPSKPDPSGECNPDLRLRGHQKEGYGLSW | In-Frame | 1443. |
| | 33134646 | NPNLSGHLLSASDDHGIRQ | Junction | |
| MRPS2 (ENST00000371785) | 138392599, | MATSSAALPRILGADENDKILNEPLKHSDFFN | In-Frame | 1444. |
| | 138393690 | VKELFSVRSLFDARVHLG | Junction | |
| MUC4 (ENST00000475231) | 195506609, | TDVSSASTGHATPLPVTSTSSASTGHATPLPVT | In-Frame | 1445. |
| | 195506464 | STSSVSTGHATPLPVTS | Junction | |
| RET (ENST00000355710) | 43598077, | FHQFRLLPVQFLCPNISVAYRLLEGHRGGHAA | Frameshift | 1446. |
| | 43601824 | CLRCRRGTCIRGAGEAVH | Junction | |
| RET (ENST00000355710) | 43598077, | HRGGHAACLRCRRGTCIRGAGEAVHKHAAPR | Frameshift | 1447. |
| | 43601824 | GHLGPADLPGGTLAQRDLG | Downstream- | |
| | | | 1 | |
| RET (ENST00000355710) | 43598077, | RGTCIRGAGEAVHKHAAPRGHLGPADLPGGT | Frameshift | 1448. |
| | 43601824 | LAQRDLGPGQRQLRAGDRT | Downstream- | |
| | | | 2 | |
| SIL1 (ENST00000265195) | 138378309, | TSQDLKSALAKFKEGAEMESSKEDKAEVKRL | In-Frame | 1449. |
| | 138362672 | FRPIEELKKDFDELNVVIE | Junction | |
| BTN3A1 (ENST00000414912) | 26409961, | FRKKKREQELREMAWSTMKQEQSTRGWRSIQ | In-Frame | 1450. |
| | 26410163 | YASRGERHSAYNEWKKALF | Junction | |
| SMC5 (ENST00000361138) | 72962954, | LVEKINEKFSNFFSSMQCAGEVDLHTENEIMIN | In-Frame | 1451. |
| | 72965034 | MEFELESNFEVVLNCMN | Junction | |
| NFASC (ENST00000404907) | 204951148, | IRVQAENDFGKGPEPESVIGYSGEDCLLLEGE | Frameshift | 1452. |
| | 204954282 | QLAEEPVGVSEETASQLP | Junction | |
| NFASC (ENST00000404907) | 204951148, | RVQAENDFGKGPEPESVIGYSGEDCLLLEGEQ | Frameshift | 1453. |
| | 204954282 | LAEEPVGVSEETASQLPW | Downstream- | |
| | | | 1 | |
| TMEM50A (ENST00000374358) | 25679465, | VSNGQVRGDSYSEGCLGQTGARIWLFVGFML | In-Frame | 1454. |
| | 25688102 | AFGSLIASMWILFGGYVAK | Junction | |
| MYO3B (ENST00000334231) | 171371478 | NESAAHNQAGDTSNQSSGPHSPVAAVLRGSV | In-Frame | 1455. |
| | 171375948 | HRRSHSQAESNNGRTQTSS | Junction | |
| MYO3B (ENST00000409044) | 171371478, | EKGAIAIQSGDTSNQSSGPHSPVAAVLRGSVH | In-Frame | 1456. |
| | 171375948 | RRSHSQAESNNGRTQTSS | Junction | |
| SERBP1 (ENST00000370995) | 67891846, | KEGIRRVGRRPDQQLQGEGKIIDRRPERRPPRE | In-Frame | 1457. |
| | 67889960 | RRFEKPLEEKVTWINQM | Junction | |
| LTBR (ENST00000228918) | 6494200, | GLLAASQPQAVPPYASENQTCRDQEKEYYEP | In-Frame | 1458. |
| | 6494501 | QHRICCSRCPPGTYVSATF | Junction | |
| LTBR (ENST00000539925) | 6494200, | TGISLASQLKVPPYASENQTCRDQEKEYYEPQ | In-Frame | 1459. |
| | 6494501 | HRICCSRCPPGTYVSATF | Junction | |
| MLIP (ENST00000274897) | 53928043, | MELEKREKRSLLNKNLEEKLTSKSNDYLTLN | In-Frame | 1460. |
| | 53989271 | AGSQQERDQAKLTCPSEVS | Junction | |
| LDLRAD3 (ENST00000524419) | 36057799, | MWLLGPLCLLLSSAAANPLLCSTARYHCKNG | In-Frame | 1461. |
| | 36119880 | LCIDKSFICDGQNNCQDNS | Junction | |
| LDLRAD3 (ENST00000315571) | 36057799, | RCIPGAWQCDGLPDCFDKSDEKECPNPLLCST | In-Frame | 1462. |
| | 36119880 | ARYHCKNGLCIDKSFICD | Junction | |
| HSP90AB1 (ENST00000371646) | 44219995, | KKKMEESKAKFENLCKLMKEILDKKAEADKN | In-Frame | 1463. |
| | 44220974 | DKAVKDLVVLLFETALLSS | Junction | |
| SLC9A8 (ENST00000361573) | 48439678, | QEEQSSGMTIFFSLLVLAICIILVHLLIRYRLHF | In-Frame | 1464. |
| | 48471975 | LPESVAVVSLVLRLAP | Junction | |
| MDK (ENST00000407067) | 46404298, | YKFENWGACDGGTGTKVRQGTLKKARYNAQ | In-Frame | 1465. |
| | 46405253 | CQETIRVTKPCTPKTKAKAK | Junction | |
| NFATC3 (ENST00000329524) | 68208417, | GGHEMVVTGSNFLPESKIIFLEKGQVLMKQEH | In-Frame | 1466. |
| | 68224671 | REEIDLSSVPSLPVPHPA | Junction | |
| SNRPC (ENST00000244520) | 34725328, | GGGGGGGGGGGGGGGGGGGGGGGGGGGGG | In-Frame | 1467. |
| | 34730387 | GGGGGGGMPKHTAVEGNTKRM | Junction | |
| PIP5KL1 (ENST00000388747) | 130689432, | LPRYVQHLQRHPHSLLARLLGVHSLRVDRGK | In-Frame | 1468. |
| | 130683883 | KTYFIVMQSVFYPAGRISE | Junction | |
| PIP5KL1 (ENST00000300432) | 130689432, | GGGGGGGGGGGGGGGGGGGGGGGGGGGGG | In-Frame | 1469. |
| | 130683883 | GGGGGGGGMQSVFYPAGRISE | Junction | |
| MET (ENST00000436117) | 116340338, | KIVNKNNVRCLQHFYGPNHEHCFNRVVVSRS | In-Frame | 1470. |
| | 116380004 | GPSTPHVNFLLDSHPVSPE | Junction | |
| MET (ENST00000436117) | 116395550, | YKVFPNSAPLEGGTRLTICGWDFGFRRNNKFD | In-Frame | 1471. |
| | 116397491 | LKKTRVLLGNESCTLTLN | Junction | |
| NTRK1 (ENST00000497019) | 156844800, | AHLETRWRRRTKHLLGSRWLWAWPSLPASSF | In-Frame | 1472. |
| | 156845872 | LRCSLCSTNVDGETSLGST | Junction | |
| NTRK1 (ENST00000392302) | 156844800, | ACLFLSTLLLVLNKCGRRNKFGINRVHHIKRR | In-Frame | 1473. |
| | 156845872 | DIVLKWELGEGAFGKVFL | Junction | |
| NTRK1 (ENST00000497019) | 156830938, | LTVKSWDTMQLRAARSRCTNLLAASPGQCAA | Frameshift | 1474. |
| | 156843425 | AHGGGDAPLVHPLLCGWAA | Junction | |
| NTRK1 (ENST00000497019) | 156830938, | RSRCTNLLAASPGQCAAAHGGGDAPLVHPLL | Frameshift | 1475. |
| | 156843425 | CGWAAGTVSALALQWLRAQ | Downstream- | |
| | | | 1 | |
| NTRK2 (ENST00000277120) | 87342874, | YTLIAKNEYGKDEKQISAHFMGWPGIDDGLC | In-Frame | 1476. |
| | 87366901 | CGGDCVCGGILPFGNAVSA | Junction | |
| NTRK2 (ENST00000277120) | 87325706, | DTQDLYCLNESSKNIPLANLQIPNCGANPNYP | In-Frame | 1477. |
| | 87356807 | DVIYEDYGTAANDIGDTT | Junction | |
| NTRK3 (ENST00000317501) | 88669502, | ACVLLVVLFVMINKYGRRSKFGMKGVFSNID | In-Frame | 1478. |
| | 88524591 | NHGILNLKDNRDHLVPSTH | Junction | |
| NTRK3 (ENST00000355254) | 88669502, | FACVLLVVLFVMINKYGRRSKFGMKDVQHIK | In-Frame | 1479. |
| | 88524591 | RRDIVLKRELGEGAFGKVF | Junction | |
| NTRK3 (ENST00000357724) | 88451720, | VGANLLVKIGDFGMSRDVYSTDYYRVGGHT | In-Frame | 1480. |
| | 88423659 | MLPIRWMPPESIMYRKFTTE | Junction | |
| ETV1 (ENST00000399357) | 13975333, | QAESLAFHGLPLKIKKEPHSPCSEISSACSQEQP | In-Frame | 1481. |
| | 13950932 | FKFSYGEKCLYNVRSA | Junction | |
| ETV1 (ENST00000430479) | 14017052, | QETWLAEAQVPDNDEQFVPDYQAESYFAASF | Frameshift | 1482. |
| | 13971374 | LNPVTPFLLCRRCQGKDVL | Junction | |
| ETV1 (ENST00000430479) | 14017052, | YFAASFLNPVTPFLLCRRCQGKDVLCTNARCL | Frameshift | 1483. |
| | 13971374 | SQTSPSHHKALSRSTTTQ | Downstream- | |
| | | | 1 | |
| ETV1 (ENST00000430479) | 14017052, | QGKDVLCTNARCLSQTSPSHHKALSRSTTTQC | Frameshift | 1484. |
| | 13971374 | MNTTPWLAVRPAKAFPLL | Downstream- | |
| | | | 2 | |
| ETV2 (ENST00000403402) | 36134655, | TVCSEPSPQSDRASLARCPKTNHRGGSAVGRA | Frameshift | 1485. |
| | 36135554 | QEKAGHELREAEPGPSLL | Junction | |
| ETV2 (ENST00000379023) | 36134655, | LGFCFPDLALQGDTPTATAETCWKGGSAVGR | In-Frame | 1486. |
| | 36135554 | AQEKAGHELREAEPGPSLL | Junction | |
| ETV3 (ENST00000326786) | 157106099, | GGGGGGGGGGGGGGGGGGGGGGGGGGGGG | In-Frame | 1487. |
| | 157105492 | GGGGMKAGCSIVEKPEGGGVS | Junction | |
| ETV3 (ENST00000368192) | 157103904, | KLSRALRYYYNKRILHKTKGKRFTYKFNFNK | In-Frame | 1488. |
| | 157095341 | LVMPNYPFINIRSSAHHQA | Junction | |
| ERG (ENST00000453032) | 39764298, | RPDLPYEPPRRSAWTGHGHPTPQSKVPKTEDQ | In-Frame | 1489. |
| | 39763613 | RPQLDPYQILGPTSSRLA | Junction | |
| ERG (ENST00000453032) | 39762917, | KTEDQRPQLDPYQILGPTSSRLANPVARSSFGS | Frameshift | 1490. |
| | 39755841 | SSWSSCRTAPTPAASPG | Junction | |
| ERG (ENST00000453032) | 39762917, | LDPYQILGPTSSRLANPVARSSFGSSSWSSCRT | Frameshift | 1491. |
| | 39755841 | APTPAASPGKAPTGSSR | Downstream- | |
| | | | 1 | |
| MUC16 (ENST00000380951) | 8987210, | RYMADMGQPGSLKFNITDNVMQHLLRPLFQK | In-Frame | 1492. |
| | 8976648 | SSMGPFYLGCQLISLRPEK | Junction | |
| MUC16 (ENST00000397910) | 9020765, | LYSGCRLTSLRSEKDGAATGVDAICTHRLDPK | In-Frame | 1493. |
| | 9017518 | SPGVDREQLYWELSQLTN | Junction | |
| MUC16 (ENST00000380951) | 8966650, | FLRMTRNGTQLQNFTLDRSSVLVDGDHPPAE | Frameshift | 1494. |
| | 8959706 | EGRRIQRPATVPRLLPVTP | Junction | |
| MUC16 (ENST00000380951) | 8966650, | NGTQLQNFTLDRSSVLVDGDHPPAEEGRRIQR | Frameshift | 1495. |
| | 8959706 | PATVPRLLPVTPRPGGSA | Downstream- | |
| | | | 1 | |
| ALK (ENST00000389048) | 29436850, | LDLLHVARDIACGCQYLEENHFIHRHCCQKLP | Frameshift | 1496. |
| | 29432742 | LDLSRPWKSGQDWRLRDG | Junction | |
| ALK (ENST00000389048) | 29436850, | IACGCQYLEENHFIHRHCCQKLPLDLSRPWKS | Frameshift | 1497. |
| | 29432742 | GQDWRLRDGPRHLQGELL | Downstream- | |
| | | | 1 | |
| CTAGIB (ENST00000359887) | 153846361, | ATPMEAELARRSLAQDAPPLPVPGVLLKEFTV | In-Frame | 1498. |
| | 153846155 | SGNILTMSVQDQDRDGAW | Junction | |
| ABL1 (ENST00000318560) | 133710912, | LEICLKLVGCKSKKGLSSSSSCYLEALRLLREP | Frameshift | 1499. |
| | 133738150 | LQHPGRVGSSSFNGGRR | Junction | |
| ABL1 (ENST00000318560) | 133710912, | ALRLLREPLQHPGRVGSSSFNGGRRAHHHAPL | Frameshift | 1500. |
| | 133738150 | SSPKAQQAHCLWCVPQLR | Downstream- | |
| | | | 1 | |
| ABL1 (ENST00000318560) | 133710912, | AHHHAPLSSPKAQQAHCLWCVPQLRQVGDG | Frameshift | 1501. |
| | 133738150 | THGHHHEAQAGRGPVRGGVR | Downstream- | |
| | | | 2 | |
| ABL1 (ENST00000318560) | 133710912, | QVGDGTHGHHHEAQAGRGPVRGGVRGRVEE | Frameshift | 1502. |
| | 133738150 | IQPDGGREDLEGGHHGGGRV | Downstream- | |
| | | | 3 | |
| ABL1 (ENST00000318560) | 133710912, | QAGRGPVRGGVRGRVEEIQPDGGREDLEGGH | Frameshift | 1503. |
| | 133738150 | HGGGRVLERSCSHERDQTP | Downstream- | |
| | | | 4 | |
| ABL2 (ENST00000408940) | 179112068, | YGRDQDTSLCCLCTEASESALPDLTALHRPYG | In-Frame | 1504. |
| | 179100613 | CDVEPQALNEAIRWSSKE | Junction | |
| JUN (ENST00000371222) | 59248208, | GSGGFSASLHSEPPVYANLSNFNPGPEGGASD | Frameshift | 1505. |
| | 59248073 | SARDARRDTAPVPHRHGV | Junction | |
| JUN (ENST00000371222) | 59248208, | PEGGASDSARDARRDTAPVPHRHGVPGADQG | Frameshift | 1506. |
| | 59248073 | GEEAHEEPHRCLQVPKKEA | Downstream- | |
| | | | 1 | |
| JUN (ENST00000371222) | 59248208, | PGADQGGEEAHEEPHRCLQVPKKEAGENRPA | Frameshift | 1507. |
| | 59248073 | GGKSENLESSELGAGVHGQ | Downstream- | |
| | | | 2 | |
| JUN (ENST00000371222) | 59248208, | AHEEPHRCLQVPKKEAGENRPAGGKSENLESS | Frameshift | 1508. |
| | 59248073 | ELGAGVHGQHAQGTGGTA | Downstream- | |
| | | | 3 | |
| JUN (ENST00000371222) | 59248548, | NLADPVGSLKPHLRAKNSDLLTSPDLERLIIQS | In-Frame | 1509. |
| | 59248517 | SNGHITTTPTPTQFLCP | Junction | |
| PDK1 (ENST00000543905) | 173431987, | GYENARRLCDLYYINSPELELEELNECNESHY | Frameshift | 1510. |
| | 173435454 | GTPCQQRCLPPYSSSCHA | Junction | |
| PDK1 (ENST00000543905) | 173431987, | YENARRLCDLYYINSPELELEELNECNESHYG | Frameshift | 1511. |
| | 173435454 | TPCQQRCLPPYSSSCHAG | Downstream- | |
| | | | 1 | |
| PDK1 (ENST00000436490) | 173427019, | LANIMKEISLLPDNLLRTPSVQLVQSWYIQSLQ | In-Frame | 1512. |
| | 173429217 | ELLDFKDKSAEDAKAIY | Junction | |
| GALNT8 (ENST00000252318) | 4854792, | LAVDGFNWELWCRYDALPQAWIDLHDVTAP | In-Frame | 1513. |
| | 4870124 | VKCGSVEGRSRFCPVPGLPT | Junction | |
| NINL (ENST00000422516) | 25484588, | LFSHEPALLLESSTRVKPSKAWSHYQSLDFSV | In-Frame | 1514. |
| | 25478997 | DEKVNLLELTWALDNELM | Junction | |
| SLC26A2 (ENST00000286298) | 149357633, | LIVGILLVPQSIAYSLLAGQEPVYGSDGLLSSG | Frameshift | 1515. |
| | 149359856 | FCFCLPLRCLAEWICHW | Junction | |
| SLC26A2 (ENST00000286298) | 149357633, | PVYGSDGLLSSGFCFCLPLRCLAEWICHWCLL | Frameshift | 1516. |
| | 149359856 | HYSYISGQVSSWAQPSSD | Downstream- | |
| | | | 1 | |
| MUC4 (ENST00000475231) | 195508097, | STSSASTGHATPVPVTSTSSASTGHATPVPVTS | In-Frame | 1517. |
| | 195506368 | TSSASTGDTTPLPVTNA | Junction | |
| SCARA3 (ENST00000337221) | 27491724, | MKEEDLAGDDEDMPTFPCTQKGRPGPRCSRC | In-Frame | 1518. |
| | 27507261 | QKNLSLHTSVRILYLFLAL | Junction | |
| COL1A1 (ENST00000225964) | 48265243, | GETGEQGDRGIKGHRGFSGLQGPPGSAGAPG | In-Frame | 1519. |
| | 48264471 | KDGLNGLPGPIGPPGPRGR | Junction | |
| TMEM132A (ENST00000453848) | 60694890, | TFLLLQPWPRAQPLLRASYPPFATQQPSLGAC | In-Frame | 1520. |
| | 60696101 | VVELELPSHWFSQASTTR | Junction | |
| FAM149B1 (ENST00000242505) | 74968544, | KLHFSSSYAHKASSIAKSSSFCSMERDEEDSIIV | In-Frame | 1521. |
| | 74987031 | SEGIIEEYLAFDHIDI | Junction | |
| NRP1 (ENST00000374822) | 33496500, | RIYPERATHGGLGLRMELLGCEVEAGPTTPNG | In-Frame | 1522. |
| | 33491914 | NLVDECDDDQANCHSGTG | Junction | |
| GAPDH (ENST00000229239) | 6645903, | PFIDLNYMVYMFQYDSTHGKFHGTVKAVGK | In-Frame | 1523. |
| | 6646870 | VIPELNGKLTGMAFRVPTAN | Junction | |
| GAPDH (ENST00000396858) | 6645903, | MVYMFQYDSTHGKFHGTVKAVGKVIPELNG | In-Frame | 1524. |
| | 6646870 | KLTGMAFRVPTANVSVVDLT | Junction | |
| DNAJB1 (ENST00000254322) | 14626767, | DVIRPGMRRKVPGEGLPLPKTPEKRGDLIIEFE | In-Frame | 1525. |
| | 14626275 | VIFPERIPQTSRTVLEQ | Junction | |
| PACSIN2 (ENST00000402229) | 43308027, | MSVTYDDSVGVEVSSDSFWETKEKYEKSLKE | In-Frame | 1526. |
| | 43280567 | LDQGTPQYMENMEQVFEQC | Junction | |
| PDCD1 (ENST00000418831) | 242800915, | MQIPQAPWPVVWAVLQLGWRPGWFLALLVV | In-Frame | 1527. |
| | 242795090 | TEGDNATFTCSFSNTSESFV | Junction | |
| PDCD1 (ENST00000418831) | 242794745, | QLGWRPGWFLDSPDRPWNPPTFSPALLVVTE | In-Frame | 1528. |
| | 242794505 | GDNATFTCSFSNTSESFVL | Junction | |
| CTLA4 (ENST00000427473) | 204735589, | ICTGTSSGNQVNLTIQGLRAMDTGLYICKLKK | In-Frame | 1529. |
| | 204736101 | RSPLTTGVYVKMPPTEPE | Junction | |
| CTLA4 (ENST00000302823) | 204735589, | TSSGNQVNLTIQGLRAMDTGLYICKIQNRAQI | Frameshift | 1530. |
| | 204736101 | LTSSSGSLQQLVRGCFFI | Junction | |
| CTLA4 (ENST00000302823) | 204735589, | LTIQGLRAMDTGLYICKIQNRAQILTSSSGSLQ | Frameshift | 1531. |
| | 204736101 | QLVRGCFFIAFSSQLFL | Downstream- | |
| | | | 1 | |
| EFTUD2 (ENST00000591382) | 42929777, | FGFETDLRTHTQGQAFSLSVFHHWQGLSEDVS | In-Frame | 1532. |
| | 42928737 | ISKFFDDPMLLELAKQDV | Junction | |
| FGFR3 (ENST00000481110) | 1804791, | QWLKHVEVNGSKVGPDGTPYVTVLKQVSLES | In-Frame | 1533. |
| | 1806479 | NASMSSNTPLVRIARLSSG | Junction | |
| FGFR3 (ENST00000260795) | 1804791, | QWLKHVEVNGSKVGPDGTPYVTVLKVSLESN | In-Frame | 1534. |
| | 1806479 | ASMSSNTPLVRIARLSSGE | Junction | |
| FGFR3 (ENST00000340107) | 1804791, | YLCRATNFIGVAEKAFWLSVHGPRAGVPGVQ | Frameshift | 1535. |
| | 1806479 | RVHELQHTTGAHRKAVLRG | Junction | |
| FGFR3 (ENST00000340107) | 1804791, | GVPGVQRVHELQHTTGAHRKAVLRGGPHAG | Frameshift | 1536. |
| | 1806479 | QCLRARAACRPQMGAVSGPA | Downstream- | |
| | | | 1 | |
| FGFR3 (ENST00000340107) | 1804791, | LRGGPHAGQCLRARAACRPQMGAVSGPADP | Frameshift | 1537. |
| | 1806479 | GQAPWGGLLRPGGHGGGHRH | Downstream- | |
| | | | 2 | |
| FGF11 (ENST00000293829) | 7345198, | RVVTIQSAKLGHYMAMNAEGLLYSSRRSGRA | In-Frame | 1538. |
| | 7345997 | WYLGLDKEGQVMKGNRVKK | Junction | |
| FGF11 (ENST00000572907) | 7345198, | MAMNAEGLLYSSRRSGRAWYLGLDKEGQVM | In-Frame | 1539. |
| | 7345997 | KGNRVKKTKAAAHFLPKLLE | Junction | |
| HAX1 (ENST00000447768) | 154246112, | FGFDDLFDDVWPMDPHPRTREDNDLDSQVSQ | Frameshift | 1540. |
| | 154247426 | EGLGPVLQPQPKSYFKSIS | Downstream- | |
| | | | 1 | |
| FGF10 (ENST00000264664) | 44310529, | TKKENCPYSILEITSVEIGVVAVKAINSNYYLA | In-Frame | 1541. |
| | 44305290 | MNKKGKLYGSNLTMTVS | Junction | |
| PGAP2 (ENST00000278243) | 3838765, | FGFFFCIIWSLVFHFEYTVATDCGPSTKMLSLC | Frameshift | 1542. |
| | 3845500 | SLPHPSGTCSSPAFSGG | Downstream- | |
| | | | 1 | |
| FGFR3 (ENST00000481110) | 1805563, | AGEYTCLAGNSIGFSHHSAWLVVLPGVPGVQ | In-Frame | 1543. |
| | 1806551 | RVHELQHTTGAHRKAVLRG | Junction | |
| FGFR1 (ENST00000397091) | 38314874, | CLLFWAVLVTATLCTARPSPTLPEQALEERPA | In-Frame | 1544 |
| | 38277253 | VMTSPLYLEIIIYCTGAF | Junction | |
| FGFR1 (ENST00000397091) | 38300795, | CLLFWAVLVTATLCTARPSPTLPEQDALPSSE | In-Frame | 1545. |
| | 38285953 | DDDDDDDSSSEEKETDNT | Junction | |
| FGF18 (ENST00000274625) | 170847441, | MYSAPSACTCLCLHFLLLCFQVLVAEENVDFR | In-Frame | 1546. |
| | 170863097 | IHVENQTRARDDVSRKQL | Junction | |
| HAX1 (ENST00000483970) | 154246010, | FGFGFSFSPGGGIRFHDNFGFDDLVLSQRHLV | In-Frame | 1547. |
| | 154246259 | RDYGRDRHFGTQCLSIQI | Junction | |
| FGFRL1 (ENST00000398484) | 1016263, | DAGVYVCKATNGFGSLSVNYTLVVLARPRFT | In-Frame | 1548. |
| | 1017605 | QPSKMRRRVIARPVGSSVR | Junction | |
| SLC31A1 (ENST00000374212) | 116021054, | FGFKNVELLFSGLVINTAGEMAGAFVAVFLLA | In-Frame | 1549. |
| | 116022552 | MFYEGLKIARESLLRNRC | Junction | |
| FGFR1 (ENST00000397091) | 38285439, | GTPNPTLRWLKNGKEFKPDHRIGGYKTAGVN | In-Frame | 1550. |
| | 38280693 | TTDKEMEVLHLRNVSFEDA | Junction | |
| FGFR1 (ENST00000397103) | 38285439, | GTPNPTLRWLKNGKEFKPDHRIGGYKHSGINS | In-Frame | 1551. |
| | 38280693 | SDAEVLTLFNVTEAQSGE | Junction | |
| FGFR4 (ENST00000292408) | 176523358, | NGRLPVKWMAPEALFDRVYTHQSDVYGLMR | In-Frame | 1552. |
| | 176524293 | ECWHAAPSQRPTFKQLVEAL | Junction | |
| FGFR2 (ENST00000369056) | 123324016, | WYFMVNVTDAISSGDDEDDTDGAEDFVSENS | In-Frame | 1553. |
| | 123298229 | NNKSTKPALEPHYGKCGPI | Junction | |
| RBM28 (ENST00000223073) | 127978304, | FGFVQFKNLLEAGKALKGMNMKEIKGEEKSH | In-Frame | 1554. |
| | 127976096 | ESKHQESVKKKGREEEDME | Junction | |
| NUP35 (ENST00000295119) | 184022241, | FGFPQASASYILLQFAQYGNILKHVARKALSK | In-Frame | 1555. |
| | 184023062 | DGRIFGESIMIGVKPCID | Junction | |
| FGF9 (ENST00000382353) | 22246328, | LRRRQLYCRTGFHLEIFPNGTIQGTRKDHSRFG | In-Frame | 1556. |
| | 22275329 | KTNPRVCIQRTVRRKLV | Junction | |
| FGF18 (ENST00000274625) | 170883631, | IKGKETEFYLCMNRKGKLVGKPDGTSKECVFI | In-Frame | 1557. |
| | 170884066 | EKVLENNYTALMSAKYSG | Junction | |
| FGFR3 (ENST00000481110) | 1803752, | HIQWLKHVEVNGSKVGPDGTPYVTVLKADPG | In-Frame | 1558. |
| | 1807082 | QAPWGGLLRPGGHGGGHRH | Junction | |
| FGFR4 (ENST00000292408) | 176519785, | AGEYTCLAGNSIGLSYQSAWLTVLPVLPGVRL | Frameshift | 1559. |
| | 176520407 | FRQVKLIPGTRRASLLQR | Junction | |
| FGFR4 (ENST00000292408) | 176519785, | VLPGVRLFRQVKLIPGTRRASLLQRPRLARRP | Frameshift | 1560. |
| | 176520407 | RESRSTSRPTMGVPPGQA | Downstream- | |
| | | | 1 | |
| FGFR4 (ENST00000292408) | 176519785, | PRLARRPRESRSTSRPTMGVPPGQAGAWEAPR | Frameshift | 1561. |
| | 176520407 | RGLLWPGSTCRGLWHGPC | Downstream- | |
| | | | 2 | |
| MYC (ENST00000377970) | 128749444, | LDFFRVVENQPPATMPLNVSFTNRNYDLDYD | In-Frame | 1562. |
| | 128750497 | SVQPYFYCDEEENFYQQQQ | Junction | |
| MYC (ENST00000524013) | 128750285, | GGGGGGGGGGGGGGGGGGGGGGGGGGGGG | In-Frame | 1563. |
| | 128750538 | GGGGGGGGGLDFFRVVENQEL | Junction | |
| MYCL (ENST00000397332) | 40366611, | APRGNPPKASAAPDCTPSLEAGNPAPAAPCPL | In-Frame | 1564. |
| | 40363640 | GEPKTQACSGSESPSDSE | Junction | |
| PIK3CA (ENST00000263967) | 178938869, | ALTNQRIGHFFFWHLKSEMHNKTVSQRFGLL | In-Frame | 1565. |
| | 178941869 | LESYCRACGMYLKHLNRYR | Junction | |
| PIK3CA (ENST00000263967) | 178947909, | YCVATFILGIGDRHNSNIMVKDDGQVSGDVL | Frameshift | 1566. |
| | 178951882 | QGLSSYSTACQSLHKSFLN | Junction | |
| PIK3CA (ENST00000263967) | 178947909, | RHNSNIMVKDDGQVSGDVLQGLSSYSTACQS | Frameshift | 1567. |
| | 178951882 | LHKSFLNDAWLWNARTTIF | Downstream- | |
| | | | 1 | |
| USPL1 (ENST00000255304) | 31196029, | PSDEYCPACREKGKLKALKTYRISFQESIFLCE | In-Frame | 1568. |
| | 31211881 | DLQMEIVKNLPQKYLQR | Junction | |
| NELL1 (ENST00000532434) | 20791137, | DLVNTTLGVAQVSGMHNASKAFLFQEREIHA | In-Frame | 1569. |
| | 20805232 | APHVSEKLIQLFRNKSEFT | Junction | |
| CDH17 (ENST00000027335) | 95186330, | QLPMINNVMYFQINNKTGAISLTREVTENIWK | In-Frame | 1570. |
| | 95186107 | APKPVEMVENSTDPHPIK | Junction | |
| CEP76 (ENST00000262127) | 12697226, | SYFLEWRSVLGSENGVTSLTVELMGLALERQ | In-Frame | 1571. |
| | 12691486 | KTAEKERLFLVYAKQWWRE | Junction | |
| SYMPK (ENST00000245934) | 46324642, | LNPGELLIALHNIDSVKCDMKSIIKGVEVPQGV | Frameshift | 1572. |
| | 46320232 | GGLHQVLPAHKAPELPG | Junction | |
| SYMPK (ENST00000245934) | 46324642, | DSVKCDMKSIIKGVEVPQGVGGLHQVLPAHK | Frameshift | 1573. |
| | 46320232 | APELPGHPAAAAPAAGSRL | Downstream- | |
| | | | 1 | |
| GNAS (ENST00000371102) | 57465844, | LEKRAQKRAEKKRSKLIDKQLQDEKMGYMC | In-Frame | 1574. |
| | 57478586 | THRLLLLVRRQPKCRTSKTT | Junction | |
| SCCPDH (ENST00000366510) | 246923377, | VIKLMFAGLFFLFFVRFGIGRQLLINSHGSSPL | Frameshift | 1575. |
| | 246923473 | AIFQNKAQHKNRLMLPH | Junction | |
| SCCPDH (ENST00000366510) | 246923377, | KLMFAGLFFLFFVRFGIGRQLLINSHGSSPLAIF | Frameshift | 1576. |
| | 246923473 | QNKAQHKNRLMLPHSR | Downstream- | |
| | | | 1 | |
| TBL1XR1 (ENST00000430069) | 176763917, | GVDKTTIIWDAHTGEAKQQFPFHSALDVDWQ | In-Frame | 1577. |
| | 176756216 | SNNTFASCSTDMCIHVCKL | Junction | |
| LDHD (ENST00000300051) | 75149446, | CSQKAKGELCRDFVEALKAVVGGSHVSTAAV | In-Frame | 1578. |
| | 75148866 | VREQHGRDESVHRAASALT | Junction | |
| WDR7 (ENST00000254442) | 54483375, | PDASGPEAKVQEEEHDLVDDDITTGKALTFLL | In-Frame | 1579. |
| | 54591153 | LQPPSPKLPPHSTIRRTA | Junction | |
| ZWILCH (ENST00000307897) | 66797729, | GGGGGGGGGGGGGGGGGGGGGGGGGGGGG | In-Frame | 1580. |
| | 66807864 | GGMWERLNCAAEDFYSRLLHL | Junction | |
| PNPLA6 (ENST00000600737) | 7622170, | GYLPPLCDPKDGHLLMDGGYINNLPDMAEIQ | In-Frame | 1581. |
| | 7623892 | SRLAYVSCVRQLEVVKSSS | Junction | |
| RPS2 (ENST00000529806) | 2012894, | LKIMPVQKQTRAGQRTRFKAFVAIGKPHTVPC | In-Frame | 1582. |
| | 2012761 | KVTGRCGSVLVRLIPAPR | Junction | |
| RPS2 (ENST00000530225) | 2012894, | DEVLKIMPVQKQTRAGQRTRFKAFVAIGKPH | In-Frame | 1583. |
| | 2012761 | TVPCKPRPPLMPFLRPTAT | Junction | |
| RPL37A (ENST00000446558) | 217364116, | GASLRKMVKKIEISQHAKYTCSFCGRAVGIW | In-Frame | 1584. |
| | 217364685 | HCGSCMKTVAGGAWTYNRM | Junction | |
| NOTCH1 (ENST00000277541) | 139413043, | AACFHGATCHDRVASFYCECPHGRTGANPCE | In-Frame | 1585. |
| | 139412389 | HAGKCINTLGSFECQCLQG | Junction | |
| NOTCH1 (ENST00000277541) | 139404216, | RNGANCTDCVDSYTCTCPAGFSGIHSPASTVA | Frameshift | 1586. |
| | 139403523 | PAWTASTRSPACVHPASR | Junction | |
| NOTCH1 (ENST00000277541) | 139404216, | SPASTVAPAWTASTRSPACVHPASRAATAST | Frameshift | 1587. |
| | 139403523 | MSMSATHSPACMAAPVRTA | Downstream- | |
| | | | 1 | |
| NOTCH1 (ENST00000277541) | 139404216, | AATASTMSMSATHSPACMAAPVRTAAAPTGA | Frameshift | 1588. |
| | 139403523 | PAPRATLAPTARTLCTGVT | Downstream- | |
| | | | 2 | |
| NOTCH1 (ENST00000277541) | 139404216, | AAPTGAPAPRATLAPTARTLCTGVTPRPARTA | Frameshift | 1589. |
| | 139403523 | ANAGRPTPSTAASAPAAG | Downstream- | |
| | | | 3 | |
| NOTCH1 (ENST00000277541) | 139404216, | PRPARTAANAGRPTPSTAASAPAAGPAFTATC | Frameshift | 1590. |
| | 139403523 | PACPVRWLRSDKVLTLPA | Downstream- | |
| | | | 4 | |
| NOTCH1 (ENST00000277541) | 139404216, | PAFTATCPACPVRWLRSDKVLTLPACASMEG | Frameshift | 1591. |
| | 139403523 | SVWTRATRTTAAARRATQA | Downstream- | |
| | | | 5 | |
| NOTCH1 (ENST00000277541) | 139404216, | CASMEGSVWTRATRTTAAARRATQAATVRT | Frameshift | 1592. |
| | 139403523 | WWTSAHPAPARTGPPARTTW | Downstream- | |
| | | | 6 | |
| NOTCH1 (ENST00000277541) | 139404216, | RTTAAARRATQAATVRTWWTSAHPAPARTG | Frameshift | 1593. |
| | 139403523 | PPARTTWAATPASAWPATTG | Downstream- | |
| | | | 7 | |
| NOTCH2 (ENST00000256646) | 120594098, | GGGGGGGGGGGGGGGGGGGGGMPALRPAL | In-Frame | 1594. |
| | 120572602 | LWALLALWLCCAAPAHVSRWL | Junction | |
| NOTCH2 (ENST00000256646) | 120512134, | ASCTPGSTCIDRVASFSCMCPEGKAANSNPCE | In-Frame | 1595. |
| | 120510244 | HAGKCVNTDGAFHCECLK | Junction | |
| NOTCH3 (ENST00000263388) | 15271936, | AGLGRQPPGGCVLSLGLLNPVAVPLVPAATG | Frameshift | 1596. |
| | 15271894 | AGTPAAQPRDPRLPAGAAP | Junction | |
| NOTCH3 (ENST00000263388) | 15271936, | VPAATGAGTPAAQPRDPRLPAGAAPALPGSPR | Frameshift | 1597. |
| | 15271894 | TWRGVPGGWGTQQPPKGP | Downstream- | |
| | | | 1 | |
| NOTCH3 (ENST00000263388) | 15271936, | AGTPAAQPRDPRLPAGAAPALPGSPRTWRGV | Frameshift | 1598. |
| | 15271894 | PGGWGTQQPPKGPLPAGSQ | Downstream- | |
| | | | 2 | |
| TERT (ENST00000460137) | 1294886, | FRALVAQCLVCVPWDARPPPAAPSFRQGLAV | In-Frame | 1599. |
| | 1282739 | FRPQSTVCVRRSWPSSCTG | Junction | |
| TERT (ENST00000334602) | 1276903, | YCVRRYAVVQKAAHGHVRKAFKSHVLRPVP | Frameshift | 1600. |
| | 1268748 | GDPAGLHPLHAALQPVLRRH | Junction | |
| TERT (ENST00000334602) | 1276903, | AFKSHVLRPVPGDPAGLHPLHAALQPVLRRH | Frameshift | 1601. |
| | 1268748 | GEQAVCGDSAGRAAPAFGG | Downstream- | |
| | | | 1 | |
| TET3 (ENST00000409262) | 74307714, | YTHLGSGPTVASIRELMEERYGEKGKAIRIEK | In-Frame | 1602. |
| | 74314957 | VIYTGKEGKSSRGCPIAK | Junction | |
| MAEA (ENST00000510794) | 1303464, | MWTLRATGREVPYETLNKRFRAAQKNIDRET | In-Frame | 1603. |
| | 1305767 | SHVTMVVAELEKTLSGCPA | Junction | |
| REEP5 (ENST00000545426) | 112256860, | DLLAKLEAKTGVNRSFIALGVIGLVALYLVFG | In-Frame | 1604. |
| | 112214532 | YGASLLCNLIGFGYPAYI | Junction | |
| REEP5 (ENST00000379638) | 112256860, | GVNRSFIALGVIGLVALYLVFGYGASLLCNLI | In-Frame | 1605. |
| | 112214532 | GFGYPAYISEESYREFTG | Junction | |
| REEP5 (ENST00000513339) | 112256860, | LEAKTGVNRSFIALGVIGLVALYLVFGYGASL | In-Frame | 1606. |
| | 112214532 | LCNLIGFGYPAYISEESY | Junction | |
| KRT8 (ENST00000552150) | 53292596, | EAAIADAEQRGELAIKDANAKLSELALDIEIAT | In-Frame | 1607. |
| | 53292517 | YRKLLEGEESRLESGMQ | Junction | |
| MYH11 (ENST00000576790) | 15815422, | DQLLAEEKNISSKYADERDRAEAEAKEELERT | In-Frame | 1608. |
| | 15815361 | NKMLKAEMEDLVSSKDDV | Junction | |
| TH (ENST00000333684) | 2192927, | ATTPQAKGFRRAVSELDAKQAEAIMSPRFIGR | In-Frame | 1609. |
| | 2192027 | ROSLIEDARKEREAAVAA | Junction | |
| TH (ENST00000381168) | 2192927, | GGGGGGMPTPDATTPQAKGFRRAVSELDAKQ | In-Frame | 1610. |
| | 2192027 | AEAIMGHQALGAVPSCEGV | Junction | |
| TH (ENST00000381178) | 2192927, | ATTPQAKGFRRAVSELDAKQAEAIMGAPGPS | In-Frame | 1611. |
| | 2192027 | LTGSPWPGTAAPAASYTPT | Junction | |
| MSH2 (ENST00000543555) | 47693947, | DSSAQFGYYFRVTCKEEKVLRNNKNFSTVDIQ | In-Frame | 1612. |
| | 47702164 | KNGVKFTNRLCRTNADTQ | Junction | |
| MSH6 (ENST00000538136) | 48033789, | PKSYGFNAARLANLPEEVIQKGHRKAREFEK | In-Frame | 1613. |
| | 48033918 | MNQSLRLFRKFAWLVKGQL | Junction | |
| MSH6 (ENST00000456246) | 48010632, | APGASPSPGGDAAWSEAGPGPRPLARSASPPK | In-Frame | 1614. |
| | 48025750 | AKNLNGGLRRSVAPAAPT | Junction | |
| MSH6 (ENST00000445503) | 48010632, | PGASPSPGGDAAWSEAGPGPRPLARSASPPKA | In-Frame | 1615. |
| | 48025750 | KNLNGGLRRSVAPAAPTR | Junction | |
| TRPM7 (ENST00000313478) | 50881789, | AFVGHRDSMDLQRFKETSNKIKILSDWLQDRP | In-Frame | 1616. |
| | 50873105 | SNREMPSEEGTLNGLTSP | Junction | |
| PLEKHH2 (ENST00000282406) | 43921638, | EQKQIRIQEAKIIEEKAAKIKEWVTLELENQNL | In-Frame | 1617. |
| | 43922282 | RLINQNQTEEIRTMQSK | Junction | |
| DNAJA2 (ENST00000317089) | 47001996, | GRRRGEDMMHPLKVSLEDLYNGKTTKLQLSK | In-Frame | 1618. |
| | 46993331 | NVLCSACSGYFREMGMICT | Junction | |
| POSTN (ENST00000379747) | 38151890, | NKLIKYIQIKFVRGSTFKEIPVTVYRPTLTKVKI | In-Frame | 1619. |
| | 38145601 | EGEPEFRLIKEGETIT | Junction | |
| FKBP3 (ENST00000216330) | 45599902, | NIKNVAKTANKDHLVTAYNHLFETKGPPKYT | In-Frame | 1620. |
| | 45590823 | KSVLKKGDKTNFPKKGDVV | Junction | |
| EIF3A (ENST00000541549) | 120801703, | GPRRGMDDDRGPRRGMDDDRGPRRGAEDDR | In-Frame | 1621. |
| | 120801642 | GPWRNMDDDRLSRRADDDRF | Junction | |
| RBBP8 (ENST00000327155) | 20586395, | LHTHGDKQDKVKQKAFVEPYFKGDESLQNFP | In-Frame | 1622. |
| | 20596800 | HIEVVRKKEERRKLLGHTC | Junction | |
| AURKA (ENST00000395909) | 54963212, | GGGGGGGGGGGGGGGGGGGGGGGMDRSKE | In-Frame | 1623. |
| | 54945715 | NCISGPVKEDHSLWHPGLPAP | Junction | |
| AURKA (ENST00000395909) | 54959326, | PLPSAPENNPEEELASKQKNEESKKQWALEDF | In-Frame | 1624. |
| | 54958229 | EIGRPLGKGKFGNVYLAR | Junction | |
| AURKA (ENST00000395909) | 54961313, | TSVPHPVSRPLNNTQKSKQPLPSAPGGSGLWK | Frameshift | 1625. |
| | 54958232 | TLKLVALWVKESLVMFIW | Junction | |
| AURKA (ENST00000395909) | 54961313, | GGSGLWKTLKLVALWVKESLVMFIWQEKSK | Frameshift | 1626. |
| | 54958232 | ASLFWLLKCYLKLSWRKPEW | Downstream- | |
| | | | 1 | |
| AURKA (ENST00000395909) | 54961313, | TLKLVALWVKESLVMFIWQEKSKASLFWLLK | Frameshift | 1627. |
| | 54958232 | CYLKLSWRKPEWSISSEEK | Downstream- | |
| | | | 2 | |
| AURKB (ENST00000585124) | 8110574, | TRHFTIDDFEIGRPLGKGKFGNVYLAREKKSH | In-Frame | 1628. |
| | 8110206 | FIVALKPSQHPASLQLFL | Junction | |
| KRT5 (ENST00000252242) | 52910891, | DLRNTKHEISEMNRMIQRLRAEIDNVKKQWL | In-Frame | 1629. |
| | 52908981 | WRWPRWRSWRRPRWRSCRR | Junction | |
| PAF1 (ENST00000595564) | 39879733, | EEEIYKDRDSQITAIEKTFEDAQKSSHSITANPE | Frameshift | 1630. |
| | 39879654 | SHRWRSCLSSQTLRCG | Junction | |
| PAF1 (ENST00000595564) | 39879733, | DRDSQITAIEKTFEDAQKSSHSITANPESHRWR | Frameshift | 1631. |
| | 39879654 | SCLSSQTLRCGSIHVLR | Downstream- | |
| | | | 1 | |
| GSTP1 (ENST00000398606) | 67353879, | LLSQNQGGKTFIVGDQISFADYNLLSAYVGRL | In-Frame | 1632. |
| | 67353940 | SARPKLKAFLASPEYVNL | Junction | |
| GSTP1 (ENST00000398603) | 67353879, | VEDLRCKYISLIYTNYISFADYNLLSAYVGRLS | In-Frame | 1633. |
| | 67353940 | ARPKLKAFLASPEYVNL | Junction | |
| ULK2 (ENST00000361658) | 19685202, | CVLDLTAMRGGNPELCTSAVSLYQIQESVVV | In-Frame | 1634. |
| | 19683942 | DQISQLSKDWGCQESERTI | Junction | |
| AURKB (ENST00000585124) | 8113495, | GGGGGGGGGGGGGGGGGGGGGGGGGGGG | In-Frame | 1635. |
| | 8110943 | MAQKENSYPWPYGRQTLPLARR | Junction | |
| CDKN2A (ENST00000494262) | 21970910, | LDVRDAWGRLPVDLAEELGHRDVARYLRAA | In-Frame | 1636. |
| | 21968241 | AGGTRGSNHARIDAAEDIPD | Junction | |
| CDKN2B (ENST00000276925) | 22008866, | NKGMPSGGGSDEGLASAAARGLVEKVMMM | In-Frame | 1637. |
| | 22006246 | GSARVAELLLLHGAEPNCADP | Junction | |
| IPO13 (ENST00000372343) | 44432454, | ALKRKPDLFLCERLDVKAVFQCAVLALKFPE | In-Frame | 1638. |
| | 44432606 | APTVKASCGFFSCCLGVGK | Junction | |
| OSBP2 (ENST00000437268) | 31289988, | PLGRGQYREAAAGGEAAPVAAPAAGGLRAG | Frameshift | 1639. |
| | 31301856 | QQLQLGGSREGGGCLHATVV | Downstream- | |
| | | | 3 | |
| EYA1 (ENST00000388742) | 72233969, | TTGMQQATAYATYPQPGQPYGISSYGSSFTTS | In-Frame | 1640. |
| | 72211955 | SGIYTGNNSLTNSSGENS | Junction | |
| BRCA1 (ENST00000471181) | 41222945, | TAGYNAMEESVSREKPELTASTERVNKRMSM | In-Frame | 1641. |
| | 41215968 | VVSGLTPEEFMLSLCVNGH | Junction | |
| BRCA1 (ENST00000471181) | 41209069, | EVRGDVVNGRNHQGPKRARESQDRKGARNL | Frameshift | 1642. |
| | 41203126 | LLWALHQHAHRSTGMDGTAV | Junction | |
| BRCA1 (ENST00000471181) | 41209069, | GARNLLLWALHQHAHRSTGMDGTAVWCFCG | Frameshift | 1643. |
| | 41203126 | EGAFIIHPWHRCPPNCGCAA | Downstream- | |
| | | | 1 | |
| BRCA1 (ENST00000471181) | 41209069, | STGMDGTAVWCFCGEGAFIIHPWHRCPPNCG | Frameshift | 1644. |
| | 41203126 | CAARCLDRGQWLPCNWADV | Downstream- | |
| | | | 2 | |
| BRCA2 (ENST00000544455) | 32953652, | QGLSRDVTTVWKLRIVSYSKKEKDSEGKRYRI | In-Frame | 1645. |
| | 32953938 | YHLATSKSKSKSERANIQ | Junction | |
| BRCA2 (ENST00000544455) | 32932066, | GIQLADGGWLIPSNDGKAGKEEFYRFLLTVLG | Frameshift | 1646. |
| | 32944539 | LLAGIPNLDSFLTLDLFL | Junction | |
| BRCA2 (ENST00000544455) | 32932066, | AGKEEFYRFLLTVLGLLAGIPNLDSFLTLDLFL | Frameshift | 1647. |
| | 32944539 | CPYHRFSVMEEMLVVLM | Downstream- | |
| | | | 1 | |
| FOXP1 (ENST00000468577) | 71090479, | SLDLTTTCVSSSAPSKTSLIMNPHASTNGQLSV | In-Frame | 1648. |
| | 71037228 | HTPKRESLQKTKNACKP | Junction | |
| SLC13A1 (ENST00000539873) | 122808558, | IINAEAEVEATQMTYFNGSTNHGLEIDESVNG | In-Frame | 1649. |
| | 122801665 | HEINERKEKTKPVPGTCK | Junction | |
| SLC13A1 (ENST00000194130) | 122808558, | IINAEAEVEATQMTYFNGSTNHGLEIDESVNG | In-Frame | 1650. |
| | 122801665 | HEINERKEKTKPVPGTQA | Junction | |
| CDCA8 (ENST00000373055) | 38158705, | KDFDREVEIRIKQIESDRQNLLKEVDNLYNIEI | In-Frame | 1651. |
| | 38164577 | LRLPKALREMNWLDYFG | Junction | |
| GMDS (ENST00000380815) | 1626352, | EVGRCKETGKVHVTVDLKYYRPTEVGDCTK | In-Frame | 1652. |
| | 1624763 | AKQKLNWKPRVAFDELVREM | Junction | |
| GATA3 (ENST00000346208) | 8100804, | ASSSTHHPITTYPPYVPEYSSGLFPPSSLLGGSP | In-Frame | 1653. |
| | 8115702 | TGFGCKSRPKARSSTD | Junction | |
| CLIC1 (ENST00000375779) | 31704039, | GGGGGGGGGGGGGGGGGGGGGGGGGGGG | In-Frame | 1654. |
| | 31701449 | MAEEQPQVELFVKVPQAGSSEP | Junction | |
| APOL1 (ENST00000439680) | 36653453, | VLCIWVQQNVPSGTDTGDPQSKPLGDWAAGT | In-Frame | 1655. |
| | 36657223 | MDPESSIFIEDAIKYFKEK | Junction | |
| APOL1 (ENST00000431184) | 36653453, | CIWMSALFLGVGVRAEEAGARVQQNVPSGTD | In-Frame | 1656. |
| | 36657223 | TGDPQSKPLGDWAAGTMDP | Junction | |
| APOL1 (ENST00000422471) | 36653453, | EAGARVQQNVPSGTDTGDPQSKPLGDWAAG | In-Frame | 1657. |
| | 36657223 | TMDPESSIFIEDAIKYFKEK | Junction | |
| SRSF9 (ENST00000603963) | 120903505, | EIELKNRHGLVPFAFVRFEDPRDAEDAIYGRN | In-Frame | 1658. |
| | 120901910 | GYDYGQCRLRVEFPRTYG | Junction | |
| SRSF9 (ENST00000229390) | 120903505, | DAIYGRNGYDYGQCRLRVEFPRTYGGSWQDL | In-Frame | 1659. |
| | 120901910 | KDHMREAGDVCYADVQKDG | Junction | |
| EIF2S3 (ENST00000253039) | 24078299, | CPGHDILMATMLNGAAVMDAALLLIGTVAEG | In-Frame | 1660. |
| | 24082318 | APIIPISAQLKYNIEVVCE | Junction | |
| SLC16A1 (ENST00000538576) | 113459800, | QRFSSAVGLVTIVECCPVLLGPPLLEQKANEQ | In-Frame | 1661. |
| | 113456664 | KKESKEEETSIDVAGKPN | Junction | |
| EDRF1 (ENST00000368815) | 127422752, | AILLYKVACNMMMKKNQNKKHYGTIRTLLL | In-Frame | 1662. |
| | 127426487 | NCLKLLDKSRHPQLCISSLP | Junction | |
| EDRF1 (ENST00000337623) | 127422752, | KKHYGTIRTLLLNCLKLLDKSRHPQPSCAFPV | In-Frame | 1663. |
| | 127426487 | CHDTEERCRLVLSYVLEG | Junction | |
| TNS4 (ENST00000254051) | 38640736, | SSSYRGSFGLALKVQEVPASAQSRPVRTAMTS | Frameshift | 1664. |
| | 38638667 | SDTSSSSRLPKECISKEQ | Junction | |
| TNS4 (ENST00000254051) | 38640736, | VRTAMTSSDTSSSSRLPKECISKEQMRSPTLGA | Frameshift | 1665. |
| | 38638667 | SLPSCASIPSWPWPCPA | Downstream- | |
| | | | 1 | |
| TNS4 (ENST00000254051) | 38640736, | MRSPTLGASLPSCASIPSWPWPCPANSPSHREN | Frameshift | 1666. |
| | 38638667 | WEVQMGPRTLQTAQPPA | Downstream- | |
| | | | 2 | |
| TNS4 (ENST00000254051) | 38640736, | SCASIPSWPWPCPANSPSHRENWEVQMGPRTL | Frameshift | 1667. |
| | 38638667 | QTAQPPARRNLRAATPCT | Downstream- | |
| | | | 3 | |
| FOXP1 (ENST00000468577) | 71101688, | SPQQLQVLLQQQQALMLQQQQLQEFYKKQQ | In-Frame | 1668. |
| | 71090683 | EQLQLQLLQQQHAGKQPKEA | Junction | |
| FOXP1 (ENST00000484350) | 71101688, | IGAADLAHAQQQQQQALQVARQLLLQQQQQ | In-Frame | 1669. |
| | 71090683 | QQVSGLKSPKRNDKQPALQA | Junction | |
| FOXP1 (ENST00000468577) | 71019887, | QAILESPEKQLTLNEIYNWFTRMFAYFRRNAA | In-Frame | 1670. |
| | 71008542 | TWKASCTRQRRAPRSRGS | Junction | |
| FOXP1 (ENST00000491238) | 71019887, | EFQKRRPQKISGNPSLIKNMQSSHAYCTPLNA | In-Frame | 1671. |
| | 71008542 | ALQASCTRQRRAPRSRGS | Junction | |
| FOXP1 (ENST00000327590) | 71026092, | NAEVRPPFTYASLIRQAILESPEKQLTLNEIYN | In-Frame | 1672. |
| | 71008542 | WFTRMFAYFRRNAATWK | Junction | |
| FOXP1 (ENST00000468577) | 71101688, | FYKKQQEQLQLQLLQQQHAGKQPKEQVATQ | In-Frame | 1673. |
| | 71096240 | QLAFQQQLLQMQQLQQQHLL | Junction | |
| FOXP1 (ENST00000484350) | 71101688, | LLQQQQQQQVSGLKSPKRNDKQPALQQVAT | In-Frame | 1674. |
| | 71096240 | QQLAFQQQLLQMQQLQQQHL | Junction | |
| FOXP1 (ENST00000468577) | 71101688, | FYKKQQEQLQLQLLQQQHAGKQPKERQGLLT | In-Frame | 1675. |
| | 71096156 | IQPGQPALPLQPLAQGMIP | Junction | |
| FOXP1 (ENST00000484350) | 71101688, | LLLQQQQQQQVSGLKSPKRNDKQPALQRQGL | In-Frame | 1676. |
| | 71096156 | LTIQPGQPALPLQPLAQGM | Junction | |
| FOXP1 (ENST00000468577) | 71113975, | LQQQQQQQVSGLKSPKRNDKQPALQQQQVA | In-Frame | 1677. |
| | 71096246 | TQQLAFQQQLLQMQQLQQQH | Junction | |
| FOXP1 (ENST00000468577) | 71113975, | AADLAHAQQQQQQALQVARQLLLQQQQQQQ | In-Frame | 1678. |
| | 71064804 | VSGLKSPKRNDKQPALQFVP | Junction | |
| FOXP1 (ENST00000491238) | 71113975, | TVRAPFAKLFIFSALQVARQLLLQQQQQQQVS | In-Frame | 1679. |
| | 71064804 | GLKSPKRNDKQPALQFVP | Junction | |
| FOXP1 (ENST00000468577) | 71102787, | LQQQVLSPQQLQVLLQQQQALMLQQQQQVA | In-Frame | 1680. |
| | 71096246 | TQQLAFQQQLLQMQQLQQQH | Junction | |
| FOXP1 (ENST00000327590) | 71026092, | QAILESPEKQLTLNEIYNWFTRMFAYFRRNAA | In-Frame | 1681. |
| | 71021331 | TWKGAIRTNLSLHKCFIR | Junction | |
| FOXP1 (ENST00000468577) | 71102787, | QILQQQVLSPQQLQVLLQQQQALMLQQLQEF | In-Frame | 1682. |
| | 71101771 | YKKQQEQLQLQLLQQQHAG | Junction | |
| FOXP1 (ENST00000468577) | 71026979, | PLTPVTQGPSVITTTSMHTVGPIRRRYSDKYN | In-Frame | 1683. |
| | 71026193 | VPISSGHSRISRKAANTK | Junction | |
| FOXP1 (ENST00000491238) | 71161687, | RQTVRAPFAKLFIFSALQVARQLLLQQQQQQQ | In-Frame | 1684. |
| | 71090683 | VSGLKSPKRNDKQPALQA | Junction | |
| FOXP2 (ENST00000360232) | 114268732, | ILQQQVLSPQQLQALLQQQQAVMLQQLLQQQ | In-Frame | 1685. |
| | 114269911 | QQQQQQQQQQQQQQQQQQQ | Junction | |
| FOXP2 (ENST00000360232) | 114269697, | QQILQQQVLSPQQLQALLQQQQAVMLQQQQ | In-Frame | 1686. |
| | 114269923 | QQQQQQQQQQQQQQQQQQQQ | Junction | |
| FOXP2 (ENST00000403559) | 114269697, | QQAVMLQQDFLDSGLENFRAALEKNQQQQQ | In-Frame | 1687. |
| | 114269923 | QQQQQQQQQQQQQQQQQQQQ | Junction | |
| FOXP2 (ENST00000393498) | 114269697, | QILQQQVLSPQQLQALLQQQQAVMLQQQQQ | In-Frame | 1688. |
| | 114269923 | QQQQQQQQQQQQQQQQQQQQ | Junction | |
| FOXP2 (ENST00000403559) | 114269697, | QQAVMLQQDFLDSGLENFRAALEKNLLQQQ | In-Frame | 1689. |
| | 114269911 | QQQQQQQQQQQQQQQQQQQQ | Junction | |
| FOXP2 (ENST00000441290) | 114174761, | SGDTSSEVSTVELLHLQQQQALQAARQLLLQ | In-Frame | 1690. |
| | 114206045 | QQTSGLKSPKSSDKQRPLQ | Junction | |
| FOXP2 (ENST00000360232) | 114269697, | ILQQQVLSPQQLQALLQQQQAVMLQQQQQQ | In-Frame | 1691. |
| | 114269920 | QQQQQQQQQQQQQQQQQQQQ | Junction | |
| SPC24 (ENST00000592540) | 11258494, | EIEADLERQEKEVDEDTTVTIPSAVYVAQLYH | In-Frame | 1692. |
| | 11256203 | QVSKIEWDYECEPGMVKG | Junction | |
| SLC9A5 (ENST00000299798) | 67289087, | EEVHVNETLFIIVFGESLLNDAVTVGLTIKPLV | In-Frame | 1693. |
| | 67291248 | KWLKVKRSEHHKPTLNQ | Junction | |
| LRP5 (ENST00000294304) | 68207374, | HGPFTGIACGKSMMSSVSLMGGRGGVPLYDR | In-Frame | 1694. |
| | 68213904 | NHVTGASSSSSSSTKATLS | Junction | |
| NEK8 (ENST00000268766) | 27068589, | VYSWGKGARGRLGRRDEDAGLPRPVQLDET | In-Frame | 1695. |
| | 27070318 | HPYTVTSVSCCHGNTLLAVR | Junction | |
| KIAA1191 (ENST00000298569) | 175786465, | GGGGGGGGGGGGGGGGGGGGGGMASRQPE | In-Frame | 1696. |
| | 175779751 | VPGGGRRGQSTLPCHDPVISH | Junction | |
| GSN (ENST00000545652) | 124049039, | MPLCTHGGGTPRVPQGREGAWPADLACGEV | Frameshift | 1697. |
| | 124064249 | RSGARAHQPLWRLLHGRRLR | Junction | |
| GSN (ENST00000545652) | 124049039, | QGREGAWPADLACGEVRSGARAHQPLWRLL | Frameshift | 1698. |
| | 124064249 | HGRRLRHPEDSAAEERKSAV | Downstream- | |
| | | | 1 | |
| MUTYH (ENST00000456914) | 45800063, | QAASQEGRQKHAKNNSQAKPSACDGFPCVSG | Frameshift | 1699. |
| | 45796229 | PTARDLYGFQKVPGVLSVQ | Junction | |
| MUTYH (ENST00000456914) | 45800063, | KNNSQAKPSACDGFPCVSGPTARDLYGFQKV | Frameshift | 1700. |
| | 45796229 | PGVLSVQSEKAPHGPASPG | Downstream- | |
| | | | 1 | |
| MUTYH (ENST00000354383) | 45800063, | KQAASQEGRQKHAKNNSQAKPSACDGFPCVS | In-Frame | 1701. |
| | 45796229 | GPTARDLYGFQKVPGVLSV | Junction | |
| ANLN (ENST00000396068) | 36446179, | ASLNKALSSSADDASLVNASISSSVEEQELSLS | Frameshift | 1702. |
| | 36450123 | WNALESVVKNIAKKVQL | Junction | |
| ANLN (ENST00000396068) | 36446179, | EEQELSLSWNALESVVKNIAKKVQLVAHPTEP | Frameshift | 1703. |
| | 36450123 | PLLLQIQRPSKKDYSSKT | Downstream- | |
| | | | 1 | |
| ANLN (ENST00000396068) | 36446179, | SWNALESVVKNIAKKVQLVAHPTEPPLLLQIQ | Frameshift | 1704. |
| | 36450123 | RPSKKDYSSKTHLHLLPI | Downstream- | |
| | | | 2 | |
| FGGY (ENST00000371210) | 60019899, | GGGGGGGGGGGGGGGGGGGGGGGGMGQRP | In-Frame | 1705. |
| | 60073480 | DFCTRRLGALFLSHGTWVLAE | Junction | |
| FGGY (ENST00000430447) | 60019899, | HGLICEGQPVTSRLAVICGTSSCHMGQRPDFC | In-Frame | 1706. |
| | 60073480 | TRRLGALFLSHGTWVLAE | Junction | |
| BCAP31 (ENST00000345046) | 152967462, | DLQKLKDELASTKQKLEKAENQVLAMRKQSE | In-Frame | 1707. |
| | 152966400 | GLTKEYDRLLEEHAKLQEE | Junction | |
| STAG3 (ENST00000426455) | 99787219, | EAERNKGPGQRAPERLESLLEKRKEHREVRLK | In-Frame | 1708. |
| | 99795401 | CVKALKGLYGNRDLTTRL | Junction | |
| CD74 (ENST00000524315) | 149781615, | PKPPKPVSKMRMATPLLMQALPMGALPQGP | In-Frame | 1709. |
| | 149781441 | MQNATKYGNMTEDHVMHLLQ | Junction | |
| TAF6 (ENST00000453269) | 99711239, | YEEKEVDLSDIINTPLPRVPLDVCLKGKEKKA | In-Frame | 1710. |
| | 99709876 | PPLLEGAPLRLKPRSIHE | Junction | |
| TAF6 (ENST00000421980) | 99711239, | KRQKLTTSDIDYALKLKNVEPLYGFHAQEFIP | In-Frame | 1711. |
| | 99709876 | FRFASGGGRELYFYEEKE | Junction | |
| PPP1CB (ENST00000395366) | 28975042, | MADGELNVDSLITRLLEGKRRFNIKLWKTFTD | In-Frame | 1712. |
| | 29004604 | CFNCLPIAAIVDEKIFCC | Junction | |
| ASPN (ENST00000375544) | 95227370, | LRIHENKVKKIQKDTFKGMNALHVLGLPPTLL | In-Frame | 1713. |
| | 95222849 | ELHLDYNKISTVELEDFK | Junction | |
| ASPN (ENST00000375543) | 95227370, | LSHNQLSEIPLNLPKSLAELRIHENKVKKIQKD | In-Frame | 1714. |
| | 95222849 | TFKGMNALHVLDNLPSF | Junction | |
| MCTP1 (ENST00000312216) | 94050544, | EEEDDKDDKDSEKKGFINKIYAIQEYFQLDCPI | Frameshift | 1715. |
| | 94046632 | LKLAGHCSPLCVHSHPV | Junction | |
| MCTP1 (ENST00000312216) | 94050544, | GFINKIYAIQEYFQLDCPILKLAGHCSPLCVHS | Frameshift | 1716. |
| | 94046632 | HPVLHSAEIHCPCLGHQ | Downstream- | |
| | | | 1 | |
| NCAPD3 (ENST00000533155) | 134093757, | GGGGGGGGGGGGGGGGGGGGGGGGGGGM | In-Frame | 1717. |
| | 134080348 | VALRGLGSGLQPWCPLDLRLGS | Junction | |
| ABCC2 (ENST00000370449) | 101559107, | KKKKSGTKKDVPKSWLMKALFKTFYMVLLK | In-Frame | 1718. |
| | 101560143 | SFLLKLVNDIFTFIADLLCK | Junction | |
| SLC44A1 (ENST00000374723) | 108120714, | LMVIIRYISRVLVWILTILVILGSLGTGVLWWL | In-Frame | 1719. |
| | 108123475 | YAKQRRSPKETVTPEQL | Junction | |
| USP7 (ENST00000542333) | 9009111, | CKEVDYRSDRREDYYDIQLSIKGKKNRSRERC | In-Frame | 1720. |
| | 9002307 | EIPNIATSVTSTTDEIYV | Junction | |
| MLH3 (ENST00000556740) | 75489698, | DSLVLVGKVPLCFVEREANELRRGRSTVTKSI | In-Frame | 1721. |
| | 75485683 | VEEFIREQLEGPLSLMMA | Junction | |
| MLH3 (ENST00000380968) | 75489698, | EFVFPDTSDSLVLVGKVPLCFVEREANELRRG | In-Frame | 1722. |
| | 75485683 | RSTVTKSIVEGPLSLMMA | Junction | |
| TRUB2 (ENST00000546104) | 131083878, | MEGSEEKELTLTATSVPSFINHPLDHVTREKL | In-Frame | 1723. |
| | 131073880 | DRILVIQGSHQKALVMY | Junction | |
| TRUB2 (ENST00000372890) | 131083878, | PMEGSEEKELTLTATSVPSFINHPLDHVTREKL | In-Frame | 1724. |
| | 131073880 | DRILAVIQGSHQKALVM | Junction | |
| STAG3 (ENST00000426455) | 99808808, | KSRQPLWGLKEMEEEDGSELDFAQGLSLMEE | In-Frame | 1725. |
| | 99809418 | DEEEELEIQDESNEERQDT | Junction | |
| PER2 (ENST00000254657) | 239159192, | QDPIWLLMADADSSVMMTYQLPSRNVFTVKT | Frameshift | 1726. |
| | 239155165 | RKKVIFAYHMRKIFLLWDS | Junction | |
| PER2 (ENST00000254657) | 239159192, | VMMTYQLPSRNVFTVKTRKKVIFAYHMRKIF | Frameshift | 1727. |
| | 239155165 | LLWDSAKCRTPKKTKMDPP | Downstream- | |
| | | | 1 | |
| SSUH2 (ENST00000455157) | 8705430, | LCSAARRKQHCLGTRIITKNFSVNLSVCLLQLP | In-Frame | 1728. |
| | 8681755 | VCPLWYLWKPVVGKSLL | Junction | |
| LRRC63 (ENST00000595396) | 46820760, | NCQVYGRNALNLKGFFILNCPDLTPLAFQLIY | In-Frame | 1729. |
| | 46850725 | LNLSFNDLHYFPTEHIQV | Junction | |
| KIAA0319L (ENST00000325722) | 35928206, | PEPRKNRPPIAIVSPQFQEISLPTTSTVIDGSPLM | In-Frame | 1730. |
| | 35926034 | MIKSFSTIGKNLRGL | Junction | |
| ABLIM1 (ENST00000533213) | 116207639, | SEDIIKFSKFPAAQAPDPSETPKIETDHWPGPPS | In-Frame | 1731. |
| | 116205143 | FAVVDLVAERKMMRNF | Junction | |
| RAD51 (ENST00000267868) | 41021022, | YARAFNTDHQTQLLYQASAMMVESRTDYSG | In-Frame | 1732. |
| | 41021745 | RGELSARQMHLARFLRMLLR | Junction | |
| SRRM1 (ENST00000323848) | 24989295, | RRRRHSPSRSASPSPRKRQKETSPRTPSPPPRR | In-Frame | 1733. |
| | 24995614 | RSPSPRRYSPPIQRRYS | Junction | |
| NAGS (ENST00000293404) | 42083953, | RDSSHKVLSNVNLPADLDLVCNAEWGPGPCS | In-Frame | 1734. |
| | 42084691 | RTPSECYGCAAWTSWTRAV | Junction | |
| PSMA3 (ENST00000555931) | 58714546, | GGGGGGGGGGGGGGGGGMSSIGTGYDLSAS | In-Frame | 1735. |
| | 58724463 | TFSPDGRVFQVEYAMKAVEN | Junction | |
| PSMA3 (ENST00000412908) | 58714546, | DLSASTFSPDGRVFQVEYAMKAVENSSSRFVG | In-Frame | 1736. |
| | 58724463 | RCSFFSRHSKRRSFQLQI | Junction | |
| PSMA3 (ENST00000557087) | 58714546, | GGGGGGGGGGGGGGGGMSSIGTGYDLSASTF | In-Frame | 1737. |
| | 58724463 | SPDGRVFQVEYAMKAVENS | Junction | |
| C2CD3 (ENST00000313663) | 73879389, | EPKAVRTTTRYAIRCGPKQFTSYLTALLEQGN | In-Frame | 1738. |
| | 73844602 | KLRNAMVISAMKSSPETS | Junction | |
| DZANK1 (ENST00000357236) | 18393290, | RDIGTQTVGLFYPSGKLLAKKEQELASQKQRQ | In-Frame | 1739. |
| | 18371103 | EKMSDHKPLLTAISPGRA | Junction | |
| DZANK1 (ENST00000609267) | 18393290, | KRDIGTQTVGLFYPSGKLLAKKEQELASQKQR | In-Frame | 1740. |
| | 18371103 | QEKMSDHKPLLTAISPGR | Junction | |
| PPMID (ENST00000305921) | 58700963, | WPKTMTGLPSTSGTTASVVIIRGMKIVMNKSG | In-Frame | 1741. |
| | 58711214 | VNRVVWKRPRLTHNGPVR | Junction | |

TABLE 6
Selected Significantly Enriched Immunoassay Targets

| | | | Peptide | SEQ |
|---|---|---|---|---|
| Gene(s) | HGVS or Annotation | Peptide Sequence | Class | ID NO: |
| ABCC2 | NM_000392.3:p.Lys295fs | QDALVLEDVEKEKKEVWDQKRCSKILVDEG | frameshift | 1742. |
| | | SVQNFLHGAPEIIPTEASEG | | |
| PODXL- | PODXL-ZNF467 | SPTVAHESNWVTPAGVGQVGEPRLGFREAR | fusion | 1743. |
| ZNF467 | (ENST00000446198: | AMRPPGVSKATWAAARRFGR | | |
| | ENST00000484747) | | | |
| RFC1 | NM_001204747.1:p.Gly641Val | RNWQKSSSEDKKHAAKFGKFSGKDDVSSFK | simple- | 1744. |
| | | AALLSGPPGVGKTTTASLVC | sub- | |
| | | | stitution | |
| ARID3B | XM_005254129.1:p.Glu83Gln | GRPSGSTPLGPLARVPPTAAVAQVFQRGNM | simple- | 1745. |
| | | NSEPEEEDGGLEDEDGDDEV | sub- | |
| | | | stitution | |
| EPB41 | XM_005245754.1:p.Thr581fs | SLDGAAVDSADRSPRPTSAPAITQGQVAEGG | frameshift | 1746. |
| | | VLDASAKKQWSLKHRRKQG | | |
| RREB1 | XM_005249273.1:p.Gln402* | LPGDALDQKGFLALLGLQHTKDVRPAPAEEP | stop-gain | 1747. |
| | | LPDDNQAIQLQTLKCQLPG | | |
| H2AFV-RARA | H2AFV-RARA | KDSGKAKAKAVSRSQRAGLQFPVGRIHRHL | fusion | 1748. |
| | (ENST00000381124_ | KTRTTSHGRVGATAAVYSAL | | |
| | ENST00000425707) | | | |
| NXF2B | NM_001099686.2:p.Arg84* | FRDNFDKRSCHYEHGGYERPPSHCQENDGS | stop-gain | 1749. |
| | | VEMRDVHKDQQLRHTPYSIG | | |
| C8G-C8G | C8G-C8G | QKPQRPRRPASPISTIQPKANFDAQQGHRAE | splice | 1750. |
| | (ENST00000222122_ | ATTLHVAPQGTAMAVSTFR | | |
| | ENST00000222122) | | | |
| KIF13A- | KIF13A-KIF13A | SILELNELGEYAAVELHQAKDVNTGGIFQLR | splice | 1751. |
| KIF13A | (ENST00000222122_ | QSTSHGETCAAFRDTATYG | | |
| | ENST00000222122) | | | |
| PRRC2B | XM_005272227.1:p.Met772_ | EGYMALQSKGYPLPHPKSSDTLAMDSVRNE | deletion | 1752. |
| | Arg773delinsSer | SSFSASLGRAGGVSAQRDLF | | |

[0187] While preferred embodiments of the present invention have been shown and described herein, it will be obvious to those skilled in the art that such embodiments are provided by way of example only. It is not intended that the invention be limited by the specific examples provided within the specification. While the invention has been described with reference to the aforementioned specification, the descriptions and illustrations of the embodiments herein are not meant to be construed in a limiting sense. Numerous variations, changes, and substitutions will now occur to those skilled in the art without departing from the invention. Furthermore, it shall be understood that all aspects of the invention are not limited to the specific depictions, configurations or relative proportions set forth herein which depend upon a variety of conditions and variables. It should be understood that various alternatives to the embodiments of the invention described herein may be employed in practicing the invention. It is therefore contemplated that the invention shall also cover any such alternatives, modifications, variations or equivalents. It is intended that the following claims define the scope of the invention and that methods and structures within the scope of these claims and their equivalents be covered thereby.

The application's sequence listing, which the Patent Office published only in electronic form, follows.

SEQUENCE LISTING (1755 sequences)

SEQ ID NO: 1 - protein, 50 aa, Homo sapiens
IVNISSGYVEPMQTLNDVLAQLDAVFSFAHVSNGAPVPYVRPAILEKGQG

SEQ ID NO: 2 - protein, 50 aa, Homo sapiens
FYMLAAAMALSLITFIWEHLFYWKLSFCFTGVCSDRPGLLFSISRGIYSC

SEQ ID NO: 3 - protein, 50 aa, Homo sapiens
KYYLTDVDRIATLGYLPTQQDVLRVCVPTTGIIEYPFDLENIIFRMVDVG

SEQ ID NO: 4 - protein, 50 aa, Homo sapiens
GGGGGGGGGGGGGMAWQVSLLELEDRLQCPICLEVFKEPLMLQCGHSYCK

SEQ ID NO: 5 - protein, 50 aa, Homo sapiens
SSWSLVSRLGSVLQFSRTEQLADGQVGRGLPVQPHSGRSGLQGPDHRLLI

SEQ ID NO: 6 - protein, 50 aa, Homo sapiens
FEEHSMSPEREMGNENIPSTVSTISCNNIRENVFKEASSSNINEVGSSTN

SEQ ID NO: 7 - protein, 50 aa, Homo sapiens
DFFEVAKIKMTGTTKESKKFGLHGSLGKLTGSTSSLNKLSVQSSGNRRSQ

SEQ ID NO: 8 - protein, 50 aa, Homo sapiens
YGPDGLPYLKVLKHSGINSSNAEVLVLFNVTEADAGEYICKVSNYIGQAN

SEQ ID NO: 9 - protein, 50 aa, Homo sapiens
TLMRYVNLTSLLIFRSVSTAVYKRFSTMDHVVEAGFMTTDERKLFNHLKS

SEQ ID NO: 10 - protein, 50 aa, Homo sapiens
GLNVRVIDQDTAKILESERFDTHEYHNESRRLQEFLRFQDPGRIVAIAVG

SEQ ID NO: 11 - protein, 50 aa, Homo sapiens
EEERSKYDYLMILRRVVNESTVCLMWHERRQTLNLISLLALRVLAEQNII

SEQ ID NO: 12 - protein, 50 aa, Homo sapiens
QPYAPPRPGARPTHWATEEPVVPVELMESMLRPFNLVIPFAVQKGELTGE

SEQ ID NO: 13 - protein, 50 aa, Homo sapiens
DGTATAPPPRSNHAAEEASSEDEEEKEVQAMQSFNSTQQNETEPNQQVVG

SEQ ID NO: 14 - protein, 50 aa, Homo sapiens
ELALALREPDLEKVVRYLAGCGLQSFQMLVSKGYPDIGWNPVEGERYLDF

SEQ ID NO: 15 - protein, 50 aa, Homo sapiens
SNPPLPGQQSCCNHRDFFCSGAMSESAGDVRQNPCGSKACRRLFGPVDSE

SEQ ID NO: 16 - protein, 50 aa, Homo sapiens
GVPMLSVQPKGKQKGCAGCNRKIKDHYLLKALDKYWHEDCLKCACCDCRL

SEQ ID NO: 17 - protein, 50 aa, Homo sapiens
PKDKKTNLFSALIKKKKKTAPTPPKCSSSFREMDGQPERRGAGEEEGRDI

SEQ ID NO: 18 - protein, 50 aa, Homo sapiens
GGHSGPELQRTGRLFGGLVLDIKRKTPWYWSDYRDALSLQCLASFLFLYC

SEQ ID NO: 19 - protein, 50 aa, Homo sapiens
RDLKSNNIFLHEDLTVKIGDFGLATGKSRWSGSHQFEQLSGSILWMAPEV

SEQ ID NO: 20 - protein, 50 aa, Homo sapiens
NRTRTKVTIRLFQQQKHPQGSLDTGKEAEEVGLKGERSELLLSEKVVDAR

SEQ ID NO: 21 - protein, 50 aa, Homo sapiens
LFKLLKEGHRMDKPANCTHDLYMIMLECWHAAPSQRPTFKQLVEDLDRVL

SEQ ID NO: 22 - protein, 50 aa, Homo sapiens
RDAGCRPYMAPERIDPSASRQGYDVHSDVWSLGITLYELATGRFPYPKWN

SEQ ID NO: 23 - protein, 50 aa, Homo sapiens
SDVMDQNLLNFLPEQEHSEVYKILSFHMLVTDSPSPEYLKLPSPSCNGFD

SEQ ID NO: 24 - protein, 50 aa, Homo sapiens
GSSDDAERKQERETFSSAEGTVDKDMTIMELRDRLPKKQQASASTDGVDK

SEQ ID NO: 25 - protein, 50 aa, Homo sapiens
EFDEERAQQEDALAQQAFEEARRRTHEFEDRDRSHREEMEVRVSQLLAVT

SEQ ID NO: 26 - protein, 50 aa, Homo sapiens
STVKTKSTSASINNLKPGTVYVFQIWAFTAAGYGNYSPRLDVATLEEATA

SEQ ID NO: 27 - protein, 50 aa, Homo sapiens
QPAFHLKPDTPVSVKKHHVIQELPLENTFVGGCDTLSKRSSTSSDHFSAS

SEQ ID NO: 28 - protein, 50 aa, Homo sapiens
RDLKSNNIFLHEDLTVKIGDFGLATRKSRWSGSHQFEQLSGSILWMAPEV

SEQ ID NO: 29 - protein, 50 aa, Homo sapiens
HYPAPKRNKPTVYGVSPNYDKWEMECTDITMKHKLGGGQYGEVYEGVWKK

SEQ ID NO: 30 - protein, 50 aa, Homo sapiens
GGMPDNRQPRNRQPRIRSGNEPRSASAMEPDGRGAWAHSRAALDRLEKLL

SEQ ID NO: 31 - protein, 50 aa, Homo sapiens
YYAECHGVIYVIDSTDEERLAESKQVFEKVVTSEALCGVPVLVLANKQDV

SEQ ID NO: 32 - protein, 50 aa, Homo sapiens
KAVAEKFPSMPKPKKGLKGFFSSIRCHRKSKVTGAEQSEPGAKGPERVRA

SEQ ID NO: 33 - protein, 50 aa, Homo sapiens
RSQPGIKFTIPLSGYGGTSNLILEGIKKLSDSYMVTVNGLVPGKESKIVF

SEQ ID NO: 34 - protein, 50 aa, Homo sapiens
RQSLRLVMEYLPSGCLRDFLQRHRAHLDASRLLLYSSQICKGMEYLGSRR

SEQ ID NO: 35 - protein, 50 aa, Homo sapiens
TKGCCSQTDGLNSKFLDFFSKAIQCVRQEKSSSGLNHILAALTIFLKTLA

SEQ ID NO: 36 - protein, 50 aa, Homo sapiens
SSFLDFQRNSMEKLSKDGVDLITRKDKKANLMEQLFGASGSSTISSKSSD

SEQ ID NO: 37 - protein, 50 aa, Homo sapiens
ARPLSVKIVMTYRLCSEQLSSQFHYEYGMRAVKAVLVAAGNLKLKYPNEN

SEQ ID NO: 38 - protein, 50 aa, Homo sapiens
VMASVDNPHVCRLLGICLTSTVQLIMQLMPFGCLLDYVREHKDNIGSQYL

SEQ ID NO: 39 - protein, 50 aa, Homo sapiens
NRQCVQASSQCFQSATDVAAFLGALTSLGSLNIPYKIEAVQSETVEPPPP

SEQ ID NO: 40 - protein, 50 aa, Homo sapiens
GGMTAVHAGNINFKWDPKSLEIRTLSVERLLEPLVTQVTTLVNTNSKGPS

SEQ ID NO: 41 - protein, 50 aa, Homo sapiens
GRKPRSPRDSGPQKELVIPGIVDFEWIRRALRTPKPQTPGTYCFGRLSHH

SEQ ID NO: 42 - protein, 50 aa, Homo sapiens
EPCCLRPLPSQGAPSVGTEVKLTKKQALSISPLSDASLDLQTVIRTSPSS

SEQ ID NO: 43 - protein, 50 aa, Homo sapiens
IETKMEEASDTCEADCLRKRAEQSLKAAIKTLRKSIGRQQFYVQVSGTEY

SEQ ID NO: 44 - protein, 50 aa, Homo sapiens
ARALQLVRALRSATQHTGTLFGNDVCTAYQLLGHVLQHESWQQGFDLAAT

SEQ ID NO: 45 - protein, 50 aa, Homo sapiens
ETGWLKVTEPLDRERIATYTLFSHALSSNGNAVEDPMEILITVTDQNDNK

SEQ ID NO: 46 - protein, 50 aa, Homo sapiens
LPEFYYRPPRPPKGACKVPAQESQDGSGSRPAAPLIGAPANSEDTHLVDP

SEQ ID NO: 47 - protein, 50 aa, Homo sapiens
KHKILKESVPVGTGNQLVTFQGQPECDEKIKEPTLLGFHTASGKKVKIAK

SEQ ID NO: 48 - protein, 50 aa, Homo sapiens
TSLDGHLLEPDAEYLHWLLTNIPGNQVAEGQVTCPYLPPFPARGSGIHRL

SEQ ID NO: 49 - protein, 50 aa, Homo sapiens
PYYVSHFLPALLTPRVLPKVPDSRVEFIESLKRADKIPPSLYSTYCQACS

SEQ ID NO: 50 - protein, 50 aa, Homo sapiens
ERVFTEERARFYGAEIVSALEYLHSWDVVYRDIKLENLMLDKDGHIKITD

SEQ ID NO: 51 - protein, 50 aa, Homo sapiens
PPPGLPSQQDMDLIDILWRQDIDLGGSREVFDFSQRRKEYELEKQKKLEK

SEQ ID NO: 52 - protein, 50 aa, Homo sapiens
KRLKQAKELDRERAAANEQLTRAILWERICSEEERAKAKHLIKVELLWVK

SEQ ID NO: 53 - protein, 50 aa, Homo sapiens
RDRDMADTPCELAKRDPKGVGVRRRLARPLELDSGGEEDEKESLSASSSS

SEQ ID NO: 54 - protein, 50 aa, Homo sapiens
DTKVIGNGSFGVVYQAKLCDSGELVTIKKVLQDKRFKNRELQIMRKLDHC

SEQ ID NO: 55 - protein, 50 aa, Homo sapiens
GSVVAAVQGLNLRSPNNFLSYYRLTHFLSRVIKCDPDCLRACQEQIEALL

SEQ ID NO: 56 - protein, 50 aa, Homo sapiens
PRLDSVTSSESFASSGFQEDKSLSDAEEEEDSDGFYKEPITMEDLISYSF

SEQ ID NO: 57 - protein, 50 aa, Homo sapiens
MHSDAGTSCPVLCTCRNQVVDCSSQWLFSVPPDLPMDTRNLSLAHNRITA

SEQ ID NO: 58 - protein, 50 aa, Homo sapiens
PLPQPGDKSSWGRTRSLGGLISAVGIGSTGGGCGGPGPGALPPANTYASI

SEQ ID NO: 59 - protein, 50 aa, Homo sapiens
SSSLSGGHASPHLFTFPPTPPKDVSLDPSLSTPGSAGSARQDEKECLKYQ

SEQ ID NO: 60 - protein, 50 aa, Homo sapiens
CVIREICCERSSSSESTGTPSNPDLNAGVYQVTVYQAGESDTDSFEEDPE

SEQ ID NO: 61 - protein, 50 aa, Homo sapiens
AEKAFWLSVHGPRAAEEELVEADEACSVYAGILSYGVGFFLFILVVAAVT

SEQ ID NO: 62 - protein, 50 aa, Homo sapiens
TLRRVGDGVQRNHETAFQGWVCGVLSCRGPRRWHQECAAGFCRCCWSRSW

SEQ ID NO: 63 - protein, 50 aa, Homo sapiens
RMEQPEGCPPKVYELMRACWKWSPANRPSFAETHQAFETMFHDSSISEEV

SEQ ID NO: 64 - protein, 50 aa, Homo sapiens
AKVTMNDFDYLKLLGKGTFGKVILVWEKATGRYYAMKILRKEVIIAKDEV

SEQ ID NO: 65 - protein, 50 aa, Homo sapiens
QTVSAIATTAMGSPKEVIFSDITENLATVSWRAPTAQVESFRITYVPITG

SEQ ID NO: 66 - protein, 50 aa, Homo sapiens
AAKLSAKKQASIYRDENDDFQVEKKIIRPLETTQQIRKRHCFGTEVHNLD

SEQ ID NO: 67 - protein, 50 aa, Homo sapiens
DQGRQTYLPQPAICPDSVYKLMLSCWRRYTKNRPSFQEIHLLLLQQGDEG

SEQ ID NO: 68 - protein, 50 aa, Homo sapiens
QSCHPKPVSSDTEDVTKRKNHNFLECKRRNDLRSRFLALRDQVPTLASCS

SEQ ID NO: 69 - protein, 50 aa, Homo sapiens
PDGRIGGAHADTRDSLLELSPVERGMVSIFGVASRFFVAMSSKGKLYGSP

SEQ ID NO: 70 - protein, 50 aa, Homo sapiens
FFKRAAEGKQKYLCASRNDCTIDKFQRKNCPSCRLRKCYEAGMTLGARKL

SEQ ID NO: 71 - protein, 50 aa, Homo sapiens
MTERVAEILTGSNLNDGLWHSVSINSRRNRITLTLDDEAAPPAPDSTWVQ

SEQ ID NO: 72 - protein, 50 aa, Homo sapiens
AATSSAYAGGEGIQHASHGTASAASSSTSTPGAAEGGAARTAGGMAVAGT

SEQ ID NO: 73 - protein, 50 aa, Homo sapiens
LVLLTFLAFASCCIAAYRPSETLCGRELVDTLQFVCGDRGFYFSRPASRV

SEQ ID NO: 74 - protein, 50 aa, Homo sapiens
SSCSDSTNEYMDMKPGVSYVVPTKANKRRSVRIGSYIERDVTPAIMEDDE

SEQ ID NO: 75 - protein, 50 aa, Homo sapiens
QIRSLSEAMSVEKIAAIKAKIMAKKISTIKTDLDDDITALKQRSFVDAEV

SEQ ID NO: 76 - protein, 50 aa, Homo sapiens
AVLRHLETFEHPNVVRLFDVCTVSRADRETKLTLVFEHVDQDLTTYLDKV

SEQ ID NO: 77 - protein, 50 aa, Homo sapiens
NNIRKKDHEPLRAVCCSLINWLEANTEYLVERDYESACKIWSGNEMLLTL

SEQ ID NO: 78 - protein, 50 aa, Homo sapiens
CVIWKGWIDLQRLDGMGCLEFDEERTQQEDALAQQAFEEARRRTREFEDR

SEQ ID NO: 79 - protein, 50 aa, Homo sapiens
TDLDDEVGSPAEEFKAFAADTGMNRTQSEYCNVGTKTYLTNHPAKKFVFD

SEQ ID NO: 80 - protein, 50 aa, Homo sapiens
LVQMEKLAGIAEGGKRGSESAQNEPLGSSPSDLGVIVVIVVISCLVCLDR

SEQ ID NO: 81 - protein, 50 aa, Homo sapiens
PITHDLIISLARYIHCPKPPQGCPGWKPPRQHSGPVGNPTDLPRPGAGDQ

SEQ ID NO: 82 - protein, 50 aa, Homo sapiens
ILARNMDKIITVMSMGMKCLNMGVAIDCYHQLDRRNMVRWLVKLRKNMRR

SEQ ID NO: 83 - protein, 50 aa, Homo sapiens
TSTMPGMICKNPDLEFDSLQPCFYPNEDDFYFGGPDSTPPGEDIWKKFEL

SEQ ID NO: 84 - protein, 50 aa, Homo sapiens
AADKRPRGRPRKDGASPFQRARKKPQSRGKTAVEDEDSMDGLETTETETI

SEQ ID NO: 85 - protein, 50 aa, Homo sapiens
YTLKPLLRGPWAEEEKGRVYGDGSAQILHVYTREGFSFEALPPRASCETP

SEQ ID NO: 86 - protein, 50 aa, Homo sapiens
DELLKLLLPLLLRYSGEFVQSAYLSHRLAYFCTRRLALQLDGVSSHSSHV

SEQ ID NO: 87 - protein, 50 aa, Homo sapiens
AGPAANSLPPIVDPDPLIPCDLMDGWDAFLTLARDKHLEFSSLRRAQWST

SEQ ID NO: 88 - protein, 50 aa, Homo sapiens
VLYLRNVSAEDAGEYTCLAGNSIGLFYQSAWLTVLPEEDPTWTAAAPEAS

SEQ ID NO: 89 - protein, 50 aa, Homo sapiens
DVNDNAPEFSADPYAITVFENTEPGMLLTRVQATDADAGLNRKILYSLID

SEQ ID NO: 90 - protein, 50 aa, Homo sapiens
EKGRRRSSPARSRIKQGRSSSFPGRCRPRGGAHGGRGRGRARLKSTASSI

SEQ ID NO: 91 - protein, 50 aa, Homo sapiens
YSGGFEPFSVLRFSQKFVDRVANPKYIIHFFRHREQKEKTGEEINFGKLI

SEQ ID NO: 92 - protein, 50 aa, Homo sapiens
PAIRNQIIRELQVLHECNSPYIVGFCGAFYSDGEISICMEHMDGGSLDQV

SEQ ID NO: 93 - protein, 50 aa, Homo sapiens
NCKTMGSWGQEPLGPAAQEQAFTGGSQLSLLLMENSIGGLQESHQEGEEG

SEQ ID NO: 94 - protein, 50 aa, Homo sapiens
DALNASFLPSESGPYGYSNPKILKQIMTLNLADPVGSLKPHLRAKNSDLL

SEQ ID NO: 95 - protein, 50 aa, Homo sapiens
WSSLLRNWNSLAVTHPGYMAFLTYDKVKARLQKFIHKPGSYIFRLSCTRL

SEQ ID NO: 96 - protein, 50 aa, Homo sapiens
ASHKTVHTGEKPYRCNICGAQFNRPDNLKTHTRIHSGEKPYKCETCGARF

SEQ ID NO: 97 - protein, 50 aa, Homo sapiens
VECIAVLDVLLCLANYSRGGDGPMCHPVILLPEDTPPFLELKGSRHPCIT

SEQ ID NO: 98 - protein, 50 aa, Homo sapiens
NTLFIVSISKTLAANEPHLTLEFLEQCISGFSKSSIELKHLCLEYMTPWL

SEQ ID NO: 99 - protein, 50 aa, Homo sapiens
PTSAPVLLQHYPLYRRSDANCSGEDTAPAEERDIPFKENYDVLSREASQK

SEQ ID NO: 100 - protein, 50 aa, Homo sapiens
GGGGGGGGGGGGGGGGGGGGGGGGMCTLLSGLYKYMFQKDEYCILILGLD

SEQ ID NO: 101 - protein, 50 aa, Homo sapiens
GKKPGIINEENNDSKRLVGENTNRAALNYTTRDFYNEKLEEIKEKKKFCK

SEQ ID NO: 102 - protein, 50 aa, Homo sapiens
DIKREHDVRKPKELSACGQKKQRLGKQRERSASPQRAARPRLEEAPGGQG

SEQ ID NO: 103 - protein, 50 aa, Homo sapiens
GVYRCMISYGGADYKRITVKVNAPYSKINQRILVVDPVTSEHELTCQAEG

SEQ ID NO: 104 - protein, 50 aa, Homo sapiens
DCGVFVALDKLELIEDDDTALESDYTGPGDTMQVELPPLEINSRVSLKVG

SEQ ID NO: 105 - protein, 50 aa, Homo sapiens
SCEYCFDEPLLKRTDKYRTYSKKHFQIFREVGPKNSYIAYIEDHSGNGTF

SEQ ID NO: 106 - protein, 50 aa, Homo sapiens
DICKCSIGKLHKSVSSANTCGIFSTSSGKSVQVSDASLQNARQVFSEIED

SEQ ID NO: 107 - protein, 50 aa, Homo sapiens
QGTPSGSPFPSQQTTMYQQQQQNYKWPMDGTYGPPAKRHEGEMYSVPYST

SEQ ID NO: 108 - protein, 50 aa, Homo sapiens
SGRITPPRRAPSPDGFSPYSPEETNCRVNKVMRARLYLLQQIGPNSFLIG

SEQ ID NO: 109 - protein, 50 aa, Homo sapiens
GARDLISRLLKHNPSQRPMLREVLEHPWITANLSKPSNCQNKESASKQSG

SEQ ID NO: 110 - protein, 50 aa, Homo sapiens
NLRAFTEERAKLASADHFYLLLLAILCYQLRIECMLLCEGAAAVLDMVRP

SEQ ID NO: 111 - protein, 50 aa, Homo sapiens
VPMVLVGNKCDLAARTVESRQAQDLTRSYGIPYIETSAKTRQVRGTPRAA

SEQ ID NO: 112 - protein, 50 aa, Homo sapiens
KYCTGERKRYRLCNVHPCRSEAPTFWQMQCSEFDTVPYKNELYHWFPIFN

SEQ ID NO: 113 - protein, 50 aa, Homo sapiens
RFGRRAIQVMMMGSARVAELLLLHGVEPNCADPATLTRPVHDAAREGFLD

SEQ ID NO: 114 - protein, 50 aa, Homo sapiens
RQLVHVVKWAKALPGFRNLHVDDQMTVIQYSWMGLMVFAMGWRSFTNVNS

SEQ ID NO: 115 - protein, 50 aa, Homo sapiens
MLIEEEVQKLKRYKIENIRRKHNYLPFIMELLKTLAEHQKLIPLVEKGKG

SEQ ID NO: 116 - protein, 50 aa, Homo sapiens
VGTVKVYLPNKQRTVVTVRDGMSVYNSLDKALKVRGLNQDCCVVYRLIKG

SEQ ID NO: 117 - protein, 50 aa, Homo sapiens
SMEEDSGLSLPTSPVSCMEEEEVCDSKFHYDNTAGISQYLQNSKRKSRPV

SEQ ID NO: 118 - protein, 50 aa, Homo sapiens
TSFLETLKTERLSPDLLTLGPALPSLLPVPNSAYGGPDFSSTFFSPTGSP

SEQ ID NO: 119 - protein, 50 aa, Homo sapiens
KFEALAAHDALVELSGAMNTTACSLIKIANDIRFLGSGPRSGLGELILPE

SEQ ID NO: 120 - protein, 50 aa, Homo sapiens
SVTICDYLPPHLVIYIDVPVPEVQRQIQKKGDPHEMKITSAYLQDIENAY

SEQ ID NO: 121 - protein, 50 aa, Homo sapiens
FSVAQCQLMKTERPRPNTFIIRCLQRTTVIERTFHVETPEEREEWTTAIQ

SEQ ID NO: 122 - protein, 50 aa, Homo sapiens
ITAIPEKENEGNDVPDCRRTISAPVIRPKDAYIKKENSKLFDPCNSVEFL

SEQ ID NO: 123 - protein, 50 aa, Homo sapiens
NLHVTALTTEETLTMLYQVKKGVCDESFGIHVAELANFPKHVIECAKQKA

SEQ ID NO: 124 - protein, 50 aa, Homo sapiens
IPRACPREVQMGDFVRYHYNGTFEDDKKFDSSYDRNTLVAIVVGVGRLIT

SEQ ID NO: 125 - protein, 50 aa, Homo sapiens
VLKEVTEASTGTYTLALWNSAAGLRHNISLELVVNVPPQIHEKEASSPSI

SEQ ID NO: 126 - protein, 50 aa, Homo sapiens
HIKVTQEQYELYCEMGSTFQLCKICSENDKDVKIEPCGHLMCTSCLTSWQ

SEQ ID NO: 127 - protein, 50 aa, Homo sapiens
PRERSQAGGMGTLWSQESTPEERLPMEGSRPWAVARRVLTAILILGLLLC

SEQ ID NO: 128 - protein, 50 aa, Homo sapiens
FHTVTKCLMSRDRFLKMRGMEILGNICKAEDNGVLICEYVDQDSYREIIC

SEQ ID NO: 129 - protein, 50 aa, Homo sapiens
GGPNGKLATDKTQCYDPSTNKWSLKVAMPVEAKCINAVSFRDRIYVVGGA

SEQ ID NO: 130 - protein, 50 aa, Homo sapiens
TYQFNSPESVPLGTHLGRIKANDPDMGENAEMEYSIAEGDGADMFDVITD

SEQ ID NO: 131 - protein, 50 aa, Homo sapiens
ACGLYHKMNGINRPLIKPQRRLSASHRVGLSCANCQTTTTTLWRRNAEGE

SEQ ID NO: 132 - protein, 50 aa, Homo sapiens
YFHLQRKMGYFMIQIYTPCIMTVILFQVSFWINKESVPARTVFGITTVLT

SEQ ID NO: 133 - protein, 50 aa, Homo sapiens
DCLKACQEQIEAVLLNSLQQYRQDQRDGSKSEDELDQASTRTDVRDIDLG

SEQ ID NO: 134 - protein, 50 aa, Homo sapiens
EVEVDRSETSTSLKDLFSQTLYTVSISAVHDEGESPPVTAQETTRPVPAP

SEQ ID NO: 135 - protein, 50 aa, Homo sapiens
PPEQNAPPPGAPDKDKQKQEPKTPVVPKKDLKIKNMGSWASLVQKHPTTP

SEQ ID NO: 136 - protein, 50 aa, Homo sapiens
VPEEQEHMRRWLHERFEIKDKMLIELYESPDPERRKRFPGKSVNSKLSIK

SEQ ID NO: 137 - protein, 50 aa, Homo sapiens
APRAGPDPRLLGDQRVLQSLLRLEESYVPRASYFQCVQREIKPHMRKMLA

SEQ ID NO: 138 - protein, 50 aa, Homo sapiens
GSDANPFLSKRQLDGLAGLKGEGSRSKEAGEGGLPLCGPTDKTPLLSGKA

SEQ ID NO: 139 - protein, 50 aa, Homo sapiens
TGEKPFKCNECGKKFVRKAILSDHQIIHTGEKPFQCNKCGKTFGQKSNLR

SEQ ID NO: 140 - protein, 50 aa, Homo sapiens
CRRGFKPCYNRRCIPHGKLCDGENDYGDNSDELDCKVSTCATVEFRCADG

SEQ ID NO: 141 - protein, 50 aa, Homo sapiens
IEEAKVMMNLSHEKLVQLYGVCTKQHPIFIITEYMANGCLLNYLREMRHR

SEQ ID NO: 142 - protein, 50 aa, Homo sapiens
KPDYRRWSAEVTSSTYSDEDRPPKVLPREPLSPSNSRTPSPKSLPSYLNG

SEQ ID NO: 143 - protein, 50 aa, Homo sapiens
SSLDAREVIPMAAVKQALREAGDEFKLRYRRAFSDLTSQLHITPGTAYQS

SEQ ID NO: 144 - protein, 50 aa, Homo sapiens
LHFSSQVAQGMAFLASKNCIHRDVAVRNVLLTNGHVAKIGDFGLARDIMN

SEQ ID NO: 145 - protein, 50 aa, Homo sapiens
QGQRHGMFLVRDSSTCPGDYVLSVSKNSRVSHYIINSLPNRRFKIGDQEF

SEQ ID NO: 146 - protein, 50 aa, Homo sapiens
RGFHMECCDPPLTRMPKGMWICQICQPRKKGRKLLQKKAAQIKRRYTNPI

SEQ ID NO: 147 - protein, 50 aa, Homo sapiens
SPLQKKVTEDLSKTLLMYTVPAVQGLFRSISLSRGNNLQDTLRVLTLWFD

SEQ ID NO: 148 - protein, 50 aa, Homo sapiens
CELCDKQYHKHQEFDNHINSYDHAHTQRLKELKQREFARNVASKSWKDEK

SEQ ID NO: 149 - protein, 50 aa, Homo sapiens
LMELDMAMEPDRKAAVSHWQQQSYLNSGIHSGATTTAPSLSGKGNPEEED

SEQ ID NO: 150 - protein, 50 aa, Homo sapiens
HCASAFPHLPGCCCCCFLLLFLVSSIPVTCQALGQDMVSPEATNSSSSSF

SEQ ID NO: 151 - protein, 50 aa, Homo sapiens
GRTGPSTGGRQRSRHEQARDSSRHSVSQEGQDTIRGHPGSSRGGRQGSHY

SEQ ID NO: 152 - protein, 50 aa, Homo sapiens
LECGGLREGRSNGETPAVDIGAADLTHAQQQQQQWHLINHQPSRSPSSWL

SEQ ID NO: 153 - protein, 50 aa, Homo sapiens
VDQGGVNGHRYPGAGVVIKQEQTDFTYDSDVTGCASMYLHTEGFSGPSPG

SEQ ID NO: 154 - protein, 50 aa, Homo sapiens
GGGGGGGGGGGGGGGGGGMSKKISGSSVVEMQGDEMTRIIWELIKEKLIF

SEQ ID NO: 155 - protein, 50 aa, Homo sapiens
DDGIWSEWSDKQCWEGEDLSKKTLLHFWLPFGFILILVIFVTGLLLRKPN

SEQ ID NO: 156 - protein, 50 aa, Homo sapiens
FQRQVWLLFEYPESSGPARIIAIVSAMVILISIVSFCLETLPIFRDENED

SEQ ID NO: 157 - protein, 50 aa, Homo sapiens
CPQPLVYNKLTFQLEPNPHTKYQYGRVCVASCPHNFVVDQTSCVRACPPD

SEQ ID NO: 158 - protein, 50 aa, Homo sapiens
TQPEELGPTSLKLQRDRQELRAASENRGPPQDSSAPLQGRREPPASGSHR

SEQ ID NO: 159 - protein, 50 aa, Homo sapiens
ISSDFTAVLQTLPRSEHQVVAVAARNLSRAKEFAQKHDIPKAYGSYEELA

SEQ ID NO: 160 - protein, 50 aa, Homo sapiens
SVWLCLLCYFAFPFQLLIASTFIGACCGNYTTFWGACFAYIVDQCKEHKQ

SEQ ID NO: 161 - protein, 50 aa, Homo sapiens
PVMGDGLETSQMSTTQAQAQPQPANTASTNPPPPETSNPNKPKRQTNQLQ

SEQ ID NO: 162 - protein, 50 aa, Homo sapiens
FGESQSQTLQTNYVDYLDELALEIGVKPDFCSLLFKDPKLAVRLYFGPCN

SEQ ID NO: 163 - protein, 50 aa, Homo sapiens
EKEDILWCTEMERVFGFPVHYTDVSSMSRLARQRLLGRSWSVPVIRHLFA

SEQ ID NO: 164 - protein, 50 aa, Homo sapiens
QNMSITEEMAEKMTVAKDSSDLPEELRRELLEQIADCCMRQGSYHLATKK

SEQ ID NO: 165 - protein, 50 aa, Homo sapiens
AHEHAPAHSNPSGRAALASQLLDQSTLSPAGGSGPQTWWRRRRRSISRAR

SEQ ID NO: 166 - protein, 50 aa, Homo sapiens
PVINTLPPIVDPDPLLSCDLMDGRDTFLTLARDKHWEFSSLRRSKWSTLC

SEQ ID NO: 167 - protein, 50 aa, Homo sapiens
NIPLLIAGVIGGSYSSVSIQVANLLWLFQIPQISYASTSAKLSDKSRYDY

SEQ ID NO: 168 - protein, 50 aa, Homo sapiens
IQTQNHTCSYPGWHSTTIADHTRPHEDSAPVSCLGEHHSTPSLPADPGSL

SEQ ID NO: 169 - protein, 50 aa, Homo sapiens
LFFADDDNTYSLELFQEMRTTRKVSIWPVGLVGGRRYERPLVENGKVVGW

SEQ ID NO: 170 - protein, 50 aa, Homo sapiens
GPVQGVGPAPAPHSLPEPGPQQQTFVVPRPPHQPLQMPKMMPENQYPSEQ

SEQ ID NO: 171 - protein, 50 aa, Homo sapiens
TVVAYKDAIYVFGGDNGKTMLNDLLWFDVKDCSWCRAFTTGTPPAPRYHH

SEQ ID NO: 172 - protein, 50 aa, Homo sapiens
AQGDLTKEKKDLLGELSKVLSISTECHRAEVRRAVNDERLTTIAHNMSGP

SEQ ID NO: 173 - protein, 50 aa, Homo sapiens
QLPPACAAPGGPVITAFYSGSPAPTTSAPLAQPSQAPPSLVYTVATSTTP

SEQ ID NO: 174 - protein, 50 aa, Homo sapiens
SPATAAPPAPAPTSAPGLQFACARQSELAMMHCSYWDHDSKTGALHSRLD

SEQ ID NO: 175 - protein, 50 aa, Homo sapiens
IVLRGATQQILDEAERSLHDALCVLVQTVKDSRTVYGGGCSEMLMAHAVT

SEQ ID NO: 176 - protein, 50 aa, Homo sapiens
RDLKSNNIFLHEDLTVKIGDFGLATMKSRWSGSHQFEQLSGSILWMAPEV

SEQ ID NO: 177 - protein, 50 aa, Homo sapiens
PEDLQLKNARLLCSWQLRTILSGYHQIVQQRMQHSPDLMSFMMELKMLLE

SEQ ID NO: 178 - protein, 50 aa, Homo sapiens
TCRTGYYRADFDPPEVACTSVPSGPHNVISIVNETSIILEWHPPRETGGR

SEQ ID NO: 179 - protein, 50 aa, Homo sapiens
FALKEIMSSGGAEDDIPQGERKTVTYFCYLLDKSKQLFNGLRDLPQYGQK

SEQ ID NO: 180 - protein, 50 aa, Homo sapiens
GRSLGEEGPPTRGASPPTPPVSIKSDRLSPAPGGPGDFPKTFPYPLLLAR

SEQ ID NO: 181 - protein, 50 aa, Homo sapiens
ARPHEHVSSAPQVPCFEETFQAPRKKNANPQDAPGPKVSPTPEPSPPATE

SEQ ID NO: 182 - protein, 50 aa, Homo sapiens
DVEFVCKVYSDAQPHIQWIKHVEKNDSKYGPDGLPYLKVLKAAGVNTTDK

SEQ ID NO: 183 - protein, 50 aa, Homo sapiens
IVTRDEFLRRQKTETIIYSREKNPNVFECIAPANIEAVAAKNKHCLLEAG

SEQ ID NO: 184 - protein, 50 aa, Homo sapiens
YRVNLSEEAPPGSYVSGISATDGDSCLNANLRYSIVSGNGLGWFHISEHS

SEQ ID NO: 185 - protein, 50 aa, Homo sapiens
SGIGRIKEQSARMLGHLVSNAPRLIHPYMEPILKALILKLKDPDPDPNPG

SEQ ID NO: 186 - protein, 50 aa, Homo sapiens
GRLPFYNQDHEKLFELILMEDIKFPQTLSSDAKSLLSGLLIKDPNKRLGG

SEQ ID NO: 187 - protein, 50 aa, Homo sapiens
STNEFGIFNSLWFSLGAFMQQGCDILPRSLSGRIVGGVWWFFTLIIISSY

SEQ ID NO: 188 - protein, 50 aa, Homo sapiens
AEHDLWHIIKFHRASKANKKPVQLPWGMVKSLLYQILDGIHYLHANWVLH

SEQ ID NO: 189 - protein, 50 aa, Homo sapiens
DPRPASYSFCSGKGVGIKGETSTATLRRSDLDLGYEPEGSASPTPPYLKW

SEQ ID NO: 190 - protein, 50 aa, Homo sapiens
QHVDTGNSYLCGYLKIKGLTEEYPTITTFFEGEIISKKHPFLTRKWDADE

SEQ ID NO: 191 - protein, 50 aa, Homo sapiens
VLQLPSKSERAKAFGTCVSHIGVVLTFYVPLIGLSVVHRFGNSLHPIVRV

SEQ ID NO: 192 - protein, 50 aa, Homo sapiens
PGFLISSGMSSHKQGHTSSVEYDMLWEMFSDSRSNNDDDEDEDDEDEDED

SEQ ID NO: 193 - protein, 50 aa, Homo sapiens
KPNYTSADCQAHHQFINNGNICTGDMEVIEKARRSFPSKHAALSIYSALY

SEQ ID NO: 194 - protein, 50 aa, Homo sapiens
LSRLMTGDTYTAHAGAKFPIKWTAPQSLAYNTFSIKSDVWAFGVLLWEIA

SEQ ID NO: 195 - protein, 50 aa, Homo sapiens
ERMEEDLRESNPPKNEEQKETVDNVRRCQFLDDRILQCIKQYADKIKSGI

SEQ ID NO: 196 - protein, 50 aa, Homo sapiens
TRHNVLYRIRFYFPRWYCSGSNRAYWHGISRGAEAPLLDDFVMSYLFAQW

SEQ ID NO: 197 - protein, 50 aa, Homo sapiens
RGIVVDPVNGWMYWTDWEEDEIDDSMGRIEKAWMDGFNRQIFVTSKMLWP

SEQ ID NO: 198 - protein, 50 aa, Homo sapiens
KRKQPKTFTVRIVTMDAEMEFNCEVNKQILDEKIYCPPEASVLLASYAVQ

SEQ ID NO: 199 - protein, 50 aa, Homo sapiens
AIALISFGVALLFAFFVWLFVCPWMQRKITGKLQKEGALSRVSDESLSKV

SEQ ID NO: 200 - protein, 50 aa, Homo sapiens
NLVTLESGGSGGVVWRIRASNTKLVCAVESRNGTEETKLLVLDFDVDMKG

SEQ ID NO: 201 - protein, 50 aa, Homo sapiens
ISYTPPESPVPSYASSTPLHVPVPRVLRMEEDSIRLPAHLRLQPIYWSRD

SEQ ID NO: 202 - protein, 50 aa, Homo sapiens
LELKPLLLRLPRICQRNLMSLLMAVWPSLPESGLLSVLQIAQQDLAPDPD

SEQ ID NO: 203 - protein, 50 aa, Homo sapiens
RRDFAEMSSQLHLTPFTARGRFATVAEELFRDGVNWGRIVAFFEFGGVMC

SEQ ID NO: 204 - protein, 50 aa, Homo sapiens
MNYDKLSRALRYYYDKNIMTKVHGKCYAYKFDFHGIAQALQPHPPESSLY

SEQ ID NO: 205 - protein, 50 aa, Homo sapiens
DTLYVSKCICLITPMSFMKACRSVLQQLHQAVTSPQPPPLPLESYIYNVL

SEQ ID NO: 206 - protein, 50 aa, Homo sapiens
CFHLFTSHHYNHQLLKQQLPEIQRVTLEQLCLRIKILEMFSAHNLQSVFS

SEQ ID NO: 207 - protein, 50 aa, Homo sapiens
CGLYSKMNGLSRPLIKPQKRVPSSRWLGLSCANCHTTTTTLWRRNAEGEP

SEQ ID NO: 208 - protein, 50 aa, Homo sapiens
QQVIQHHHSPRHHKSDPYSTGHLREDPSPLMIHSPQMSQFQSLTHQSPPQ

SEQ ID NO: 209 - protein, 50 aa, Homo sapiens
TGGKAPRKQLATKAARKSAPSTGGVNKPHRYRPGTVALREIRRYQKSTEL

SEQ ID NO: 210 - protein, 50 aa, Homo sapiens
LLREGNVNIQATQGGQTALMLGVSHNREDMVQALLSCQADVNLQDHDGSS

SEQ ID NO: 211 - protein, 50 aa, Homo sapiens
MQVEVLADSLHMRFLAPKIENEYETLTMKNVYNSWTYNVQYWKNGTDEKF

SEQ ID NO: 212 - protein, 50 aa, Homo sapiens
NQTNAQGQQEIVYYVLSEAPGEPPPVPEPPSGGIMEKLQGIAEEPEIQMV

SEQ ID NO: 213 - protein, 50 aa, Homo sapiens
FSDTDLLDFGQCVDQNRQQQFAFLFVVDEQLLSALVMGATGAVGSTYNYL

SEQ ID NO: 214 - protein, 50 aa, Homo sapiens
NDILRDFGILPPKEESKDEIEEMVLCLQKEAMVKPFEKMTLAQLKEAEDE

SEQ ID NO: 215 - protein, 50 aa, Homo sapiens
QESEEEEVPQESWDEGYSTPSIPPERLASYKSYSSTFHSLEEQQVCMAVD

SEQ ID NO: 216 - protein, 50 aa, Homo sapiens
FLTRTLQVLLPDLAAKASPAASALIQTLGKQLNVNRREILINNFKYIFSH

SEQ ID NO: 217 - protein, 50 aa, Homo sapiens
FSGCHADGESGSPSSSSSGSLALGSTAIRGQAEVTQDPAPLLRGFRKPAT

SEQ ID NO: 218 - protein, 50 aa, Homo sapiens
RDLAARNILLTHGRITKICDFGLARYIKNDSNYVVKGNARLPVKWMAPES

SEQ ID NO: 219 - protein, 50 aa, Homo sapiens
DKTLQDLVYDLSTSGSGSGLPLFVQHTVARTIVLQEIIGKGRFGEVWRGR

SEQ ID NO: 220 - protein, 50 aa, Homo sapiens
STGEKAPANPEILLTLEEKTAANLDLATEPRARPTPDGGASADLKEGPGN

SEQ ID NO: 221 - protein, 50 aa, Homo sapiens
GGGGGGGGGGGGGGGGGGGGGMGIQVGEPDPPEEPLTSQASVPPHQLRLG

SEQ ID NO: 222 - protein, 50 aa, Homo sapiens
RDLKSNNIFLHEDLTVKIGDFGLATKKSRWSGSHQFEQLSGSILWMAPEV

SEQ ID NO: 223 - protein, 50 aa, Homo sapiens
PTVHWLFTTCGASGPHGPTQAQCNNTYQNSNLSVEVGSEGPLKGIQIWKV

SEQ ID NO: 224 - protein, 50 aa, Homo sapiens
GGGGGGGGGGGGGGGGGGGGMVKPVTLFRRTDFKLLLCNHKDLFFLRVSK

SEQ ID NO: 225 - protein, 50 aa, Homo sapiens
GTCQDMEKRAQRRIARIQQIEKDILCIRQLLQSQATEAERSSQNKHETGS

SEQ ID NO: 226 - protein, 50 aa, Homo sapiens
KNEKRFKCDQCDYACRQERHMIMHKHTHTGEKPYACSHCDKTFRQKQLLD

SEQ ID NO: 227 - protein, 50 aa, Homo sapiens
TLPKSPQPSVPEQSDNELEQAGKSKQGSILQLCEEIAGEIESDNVEVKKE

SEQ ID NO: 228 - protein, 50 aa, Homo sapiens
FGEVAKQEEFFNLSHCQLVTLISRDNLNVRCESEVFHACINWVKYDCEQR

SEQ ID NO: 229 - protein, 50 aa, Homo sapiens
PPRMYCSTEGEWLVPIGKCSCNAGYKERGFMCQACRPGFYKALDGNMKCA

SEQ ID NO: 230 - protein, 50 aa, Homo sapiens
MKVACGDIHVNNIYGLLVIIFTYGMNSTFILLSYALILRAMLVIISQEQR

SEQ ID NO: 231 - protein, 50 aa, Homo sapiens
LGVIFLKGNSATEEEIWKFMNVLGAFDGEEHLIYGEPRKFITQDLVQEKY

SEQ ID NO: 232 - protein, 50 aa, Homo sapiens
GGGGGGGMTEYKLVVVGAGGVGKSAFTIQLIQNHFVDEYDPTIEDSYRKQ

SEQ ID NO: 233 - protein, 50 aa, Homo sapiens
AVITNQPEIAEALLGAGCDPELRDFQGNTPLHLACEQGCLASVGVLTQSC

SEQ ID NO: 234 - protein, 50 aa, Homo sapiens
LLQSQATEAERSSQNKHETGSHDAEWQNEGQGVGEINMATSGNGQGSTTR

SEQ ID NO: 235 - protein, 50 aa, Homo sapiens
VRTYVDPFTYEDPNQAVREFAKEIDTSCIKIEKVIGVGEFGEVCSGRLKV

SEQ ID NO: 236 - protein, 50 aa, Homo sapiens
EAFLTQKAKVGELKDDDFERISELGVGNGGVVTKVQHRPSGLIMARKLIH

SEQ ID NO: 237 - protein, 50 aa, Homo sapiens
YVTDGACSGDEILTMELMIMKALKWCLSPLTIVSWLNVYMQVAYLNDLHE

SEQ ID NO: 238 - protein, 50 aa, Homo sapiens
IHFNTPIPRRHTRSAEDDSERDPLNMLKPRARMTPAPASCSQELPSAEDN

SEQ ID NO: 239 - protein, 50 aa, Homo sapiens
VIVYKMKSGTKKSDFHSQMAVHKLAESIPLRRQVTVSADSSASMNSGVLL

SEQ ID NO: 240 - protein, 50 aa, Homo sapiens
AVSFISKFLRTKGLTSERQLQTFSQNLQELLAEHYKHHWFPEKPCKGSGY

SEQ ID NO: 241 - protein, 50 aa, Homo sapiens
KERSFMCSLIFLTLNWFREIVNAFCHETSPEMKGKVLTRLKHIVELQIIL

SEQ ID NO: 242 - protein, 50 aa, Homo sapiens
AIETEKIHLERTRGLDVHHTDVNLEAENNKTSFNSILNETAHNTYHNNNK

SEQ ID NO: 243 - protein, 50 aa, Homo sapiens
FEAISSMFPDKGTAEELKEKYKELTKQQLPGALPPECTPNIDGPNAKSVQ

SEQ ID NO: 244 - protein, 50 aa, Homo sapiens
TQQRHQGSELHFPSVQPSDAGVYICPCRNLHQSNTSRAELLVTEAPSKPI

SEQ ID NO: 245 - protein, 50 aa, Homo sapiens
YLDSSKPAVYNYPEGAAYEFNAAAATNAQVYGQTGLPYGPGSEAAAFGSN

SEQ ID NO: 246 - protein, 50 aa, Homo sapiens
LAGTYKDHLKEAQARVLRATSFKRRNLDPNPGDLYPESLEHRMGDPDTVP

SEQ ID NO: 247 - protein, 50 aa, Homo sapiens
HLLWLAQREDKACSRIVGALERIGGTALSPHAQHISVELSAFPREVGGAG

SEQ ID NO: 248 - protein, 50 aa, Homo sapiens
NFSVAQCQLMKTERPRPNTFIIRCLKWTTVIERTFHVETPEEREEWTTAI

SEQ ID NO: 249 - protein, 50 aa, Homo sapiens
YRSPFDTEWQSKQENTCNVTIEGLDDEKCYSFWVRVKAMEDVYGPDTYPS

SEQ ID NO: 250 - protein, 50 aa, Homo sapiens
SSNHVQNGVTFPWPDANGKAHFNLTYPERANESGLAMTDISSLASQNKTF

SEQ ID NO: 251 - protein, 50 aa, Homo sapiens
SKSVQKGELSRSPSPFTHTHLAQGYQRGAKKLESSEENLSSEDEELPCFQ

SEQ ID NO: 252 - protein, 50 aa, Homo sapiens
CLLPELLSALHRLVGLQAALWLSADCLGDLALLLETLNGSQSGASKDLLL

SEQ ID NO: 253 - protein, 50 aa, Homo sapiens
PQDGRNDFYCWVCHREGQVLCCELCTRVYHAKCLRLTSEPEGDWFCPECE

SEQ ID NO: 254 - protein, 50 aa, Homo sapiens
YLQSKECDFQTKFALSLSPGAHQKRPIPIKYKAMKKEFPSILRFITVCDY

SEQ ID NO: 255 - protein, 50 aa, Homo sapiens
ALKWIKNMEGGQGLKIIDLQMSDYLQILEHAIHFGYPVLLQNVQEYLDPT

SEQ ID NO: 256 - protein, 50 aa, Homo sapiens
ADISGMKVPWLYVGMVFSAFCWHIENHWSYSINYLHWGEPKTWYGVPSLA

SEQ ID NO: 257 - protein, 50 aa, Homo sapiens
NRAGLILPTELWTAMLNYGYVGCIRNLFIDGRSKNIRQLAEMQNAAGVKS

SEQ ID NO: 258 - protein, 50 aa, Homo sapiens
GLILMYEIKYGSQVEDQRECVSRQECRKYGGAKLNRLNPGNYTARIQATS

SEQ ID NO: 259 - protein, 50 aa, Homo sapiens
LTMKKEGIQTRNRKMSNKSKKSKKGVECFEELSKCMQEKSSPFSAAALAG

SEQ ID NO: 260 - protein, 50 aa, Homo sapiens
SFLDCQIHRVDDIQARDEVEGFLQDMFPQQLEESEKQRLGGDVQSPNCPS

SEQ ID NO: 261 - protein, 50 aa, Homo sapiens
GLGETRGSEDETDDDGEDFTPPILKDLENLSPEEAAHQKAVVETLLQEDP

SEQ ID NO: 262 - protein, 50 aa, Homo sapiens
GPFKTIKFGTNIDLSDDKKWKLQLHKLTKLPAFVRVVSAGNLLSHVGHTI

SEQ ID NO: 263 - protein, 50 aa, Homo sapiens
AESVNKEMEPLVGQVQEWMVAYLETRLADWIHSSGGWAEFTALYGDGALE

SEQ ID NO: 264 - protein, 50 aa, Homo sapiens
TTLMPHNYSRCYTCQVSNSVSSKNGMVCLSPPCTLGKKDPWELRGAQGNW

SEQ ID NO: 265 - protein, 50 aa, Homo sapiens
KEKKQTGSGPLGNSPAVPNPPFTASSAWYLQDKCGHTMQSRRDHRALRLG

SEQ ID NO: 266 - protein, 50 aa, Homo sapiens
ASAKTYYRDEHIYPYMYLAGYHCRNHNVREALQAWADTATVIQDYNYCRE

SEQ ID NO: 267 - protein, 50 aa, Homo sapiens
QTCGYKFHQHCSSKVPTVCVDMSTNCQQPSRFYHSVQDLSGGSRQHEAPS

SEQ ID NO: 268 - protein, 50 aa, Homo sapiens
GKGRFGEVWRGRWRGGDVAVKIFSSCEERSWFREAEIYQTVMLRHENILG

SEQ ID NO: 269 - protein, 50 aa, Homo sapiens
GEEWKEKTDRDFVKFWKDIVDDNEVCDLISDRNKSHEGTSGEWIWESLFH

SEQ ID NO: 270 - protein, 50 aa, Homo sapiens
FTVSIRNTLLYTLRRPYFRKMENQDSLVCISESVPEPIVEWVLCDSQGES

SEQ ID NO: 271 - protein, 50 aa, Homo sapiens
CLPNGKCTDNLAVFLESWTTFEEICSGECGDLLKACNNDSELLKFYRSRS

SEQ ID NO: 272 - protein, 50 aa, Homo sapiens
NHQNIVRCIGVSLQSLPRFILLELMVGGDLKSFLRETRPRPSQPSSLAML

SEQ ID NO: 273 - protein, 50 aa, Homo sapiens
LIDLYGNQGLPPPGLTISNSCPANLSNIKRELTACIFPTESEARALAKER

SEQ ID NO: 274 - protein, 50 aa, Homo sapiens
GDLTKEKKDLLGELSKVLSISTERHSAEVRRAVNDERLTTIAHNMSGPNS

SEQ ID NO: 275 - protein, 50 aa, Homo sapiens
PNGFPLERPWARFYVRLYKAEGLPKINSSIMANVTKAFVGDSKDLVDPFV

SEQ ID NO: 276 - protein, 50 aa, Homo sapiens
ERVFSEDRTRFYGAEIVSALDYLHSRKIVYRDLKLENLMLDKDGHIKITD

SEQ ID NO: 277 - protein, 50 aa, Homo sapiens
AMKLVNMLDKLSREELLKPMGLKPDGTIMPLEEALNQYSVIEETSSDTDG

SEQ ID NO: 278 - protein, 50 aa, Homo sapiens
CEFVERIHELGYNTYASRLYRTVSSMPGARRQPSAERLWYVSVNGKGRPR

SEQ ID NO: 279 - protein, 50 aa, Homo sapiens
VMNHWQEDLMFGYQFLNGCNPVLIRCCTELPEKLPVTTEMVECSLERQLS

SEQ ID NO: 280 - protein, 50 aa, Homo sapiens
NLHSKIYYNGDKVTYACKSGYLLHGLNEITCNRGKWTLPPECVENNENCK

SEQ ID NO: 281 - protein, 50 aa, Homo sapiens
ALQRPHSASALDQSPCAQPTMPWQDEPKQTSPSREASALTAEGGSCLISG

SEQ ID NO: 282 - protein, 50 aa, Homo sapiens
LSKGTGSRKDTKMRIRAFPMTMDEKHVNSIWDLLKNAIQEIQRKNNSGLS

SEQ ID NO: 283 - protein, 50 aa, Homo sapiens
CSAEGEWLVPIGKCMCKAGYEEKNGNCQAPSPVTNVKKGKIAKNSISLSW

SEQ ID NO: 284 - protein, 50 aa, Homo sapiens
WRRRAEDEMDLDRRAYAVWVSEVMLKQTQVATVINYYTGWMQKWPTLQDL

SEQ ID NO: 285 - protein, 50 aa, Homo sapiens
VFREPIICKNIPRLVPGWTKPITIGGHAHGDQYKATDFVADRAGTFKMVF

SEQ ID NO: 286 - protein, 50 aa, Homo sapiens
RDLKSNNIFLHEDLTVKIGDFGLATEKSRWSGSHQFEQLSGSILWMAPEV

SEQ ID NO: 287 - protein, 50 aa, Homo sapiens
ISSRIIKTPRRFIEDEDYDPPIKIAQLESTPNSRFSAPSCGSSEKSSAAS

SEQ ID NO: 288 - protein, 50 aa, Homo sapiens
GGMATSRYEPVAEIGVGAYGTVYKACDPHSGHFVALKSVRVPNGGGGGGG

SEQ ID NO: 289 - protein, 50 aa, Homo sapiens
PQAARSNSDGEKATKVQDIKNNLKEVIETIVAAMSNLVPPVELANPENQF

SEQ ID NO: 290 - protein, 50 aa, Homo sapiens
HTYVNTTGVQEERKNRTSVHVPLEAMVSNAESSTPKEEPSSIEDRDPQIL

SEQ ID NO: 291 - protein, 50 aa, Homo sapiens
SLPCTAEHGFEMNGRALCILTKDDFLHRAPSSEVTGPSQMDTRRGHLLQP

SEQ ID NO: 292 - protein, 50 aa, Homo sapiens
GGGGGGGGMSETAPAAPAAAPPAEKVPVKKKAAKKAGGTPRKASGPPVSE

SEQ ID NO: 293 - protein, 50 aa, Homo sapiens
LYITLSQASPFPELVTTRNNTSFNINEGILSLVVSLVLSSSLQFIINVTS

SEQ ID NO: 294 - protein, 50 aa, Homo sapiens
SSRHSEAGSEYTVVSMSDAGGEGSVVGSKSPVFKASTPRERNAGPGRNFT

SEQ ID NO: 295 - protein, 50 aa, Homo sapiens
KETCEKLGYQWKKSCMNQGDGLEFKRHFLKIKGKLIDIVSSQKVWLPATG

SEQ ID NO: 296 - protein, 50 aa, Homo sapiens
REVTGYVLVALNQFRYLPLENLRIIHGTKLYEDRYALAIFLNYRKDGNFG

SEQ ID NO: 297 - protein, 50 aa, Homo sapiens
KLGGFGSKRKRSSSEDDDLDVESDFNDASINSYSVSDGSTSRSSRSRKKL

SEQ ID NO: 298 - protein, 50 aa, Homo sapiens
GGGGGGGGGGGGGGGGGGGGGGGMATVILESIFLKRSQQKKKTSPLNFKK

SEQ ID NO: 299 - protein, 50 aa, Homo sapiens
DDRKTLMTKHFQELKEKMDELLPLISVLEQYKTDAKLITQFKEEIRNLSA

SEQ ID NO: 300 - protein, 50 aa, Homo sapiens
GMLKIMQDYDWHVFSLVTTIFPGYRKFISFVKTTVDNSFVGWDMQNVITL

SEQ ID NO: 301 - protein, 50 aa, Homo sapiens
GGSYGPPGPQRYPIGIQGRTPGAMARMQYPQQQDSGDATWKETFWLMPPQ

SEQ ID NO: 302 - protein, 50 aa, Homo sapiens
VRAKITYYQNTLTVMINNGFTPDKNYYEFCAKVENMIIPAQGHFGISAAT

SEQ ID NO: 303 - protein, 50 aa, Homo sapiens
IFGAGPKVVGLAMGTKDKEDEVTRRQKVTNRSDAFNMQMRQRKGTLSVNF

SEQ ID NO: 304 - protein, 50 aa, Homo sapiens
ETIIYSREKNPNAFECIAPANIEAVVAKNKHCLLEAGIGCTRDLIKSNIY

SEQ ID NO: 305 - protein, 50 aa, Homo sapiens
GAGEVERTSRAVEEKFRALCQPMRECCRRLQASREQHQFHRDVEDEILWV

SEQ ID NO: 306 - protein, 50 aa, Homo sapiens
GPGEDPNGTLIIQNVNKSHGGIYVCQVQEGNESYQQSCGTYLRVRQPPPR

SEQ ID NO: 307 - protein, 50 aa, Homo sapiens
KQMRIIHGQDFDQRAREEFRPTIYSKVIKGMRVLVDAREKLHIPWGDNSN

SEQ ID NO: 308 - protein, 50 aa, Homo sapiens
LWKQEMDENPQQLKLEKGRMEESQNKSLATLTIQGIRFEDNGIYFCQQKC

SEQ ID NO: 309 - protein, 50 aa, Homo sapiens
IAGVMTLSQVKGFVRKNGVNEAKIDKIKNDNVQDTAEQKVQLLRNWHQLH

SEQ ID NO: 310 - protein, 50 aa, Homo sapiens
GGGGGGGGMTGLLKRKFDQLDEDNSLVSSSSSSSGCQSRSCSPSSSVSRA

SEQ ID NO: 311 - protein, 50 aa, Homo sapiens
GGGGGGGGGMHPFYTRAATMIGEIADAVSFISKFLRTKGLTSERQLQTFS

SEQ ID NO: 312 - protein, 50 aa, Homo sapiens
KFFFTVIPQPIFLSPGITLTLPIVFWPLEAKEYMDQLWFEKAEGMFCVGL

SEQ ID NO: 313 - protein, 50 aa, Homo sapiens
GIRLNDGHVASLGLLARKDGTRKGYMSKRSSDNTKWQTKWFALLQNLLFY

SEQ ID NO: 314 - protein, 50 aa, Homo sapiens
PQAMNITCTGRGPDNCIQCAHYIDGLHCVKTCPAGVMGENNTLVWKYADA

SEQ ID NO: 315 - protein, 50 aa, Homo sapiens
FMHRKSDVLTTPWKFKVAKQLASALIYLEDKDLVHGNVCTKNLLLAREGI

SEQ ID NO: 316 - protein, 50 aa, Homo sapiens
YDGIHPDDLSFKKGEKMKVLEEHGELWKAKSLLTKKEGFIPSNYVAKLNT

SEQ ID NO: 317 - protein, 50 aa, Homo sapiens
TLTRPVHDAAREGFLDTLVVLHRAGERLDVRDAWGRLPVDLAEELGHRDV

SEQ ID NO: 318 - protein, 50 aa, Homo sapiens
TNPNAIKTIQKNTIFTNVAETSDGGIYWEGIDEPLASGVTITSWKNKEWS

SEQ ID NO: 319 - protein, 50 aa, Homo sapiens
PFNRHIVTLSNSVFTFSYKKAQRDLVYKPLYSWEEAKQKTVEWVGSLVDR

SEQ ID NO: 320 - protein, 50 aa, Homo sapiens
LCSLGLKVLPVIKRTDREKALCPTRDNFNSQQKNLSVSCAAASVASSRSS

SEQ ID NO: 321 - protein, 50 aa, Homo sapiens
EEDLLVSWQRAFVDRTPPPAAVAQRIAFGRDALPELQRHFAHSPADRDEV

SEQ ID NO: 322 - protein, 50 aa, Homo sapiens
SIPDSSYPMDHRFRRQLSEPCNSFPSLPTMPREGRPMYQRQMSEPNIPFP

SEQ ID NO: 323 - protein, 50 aa, Homo sapiens
QHFYGPNHEHCFNRTLLRNSSGCEAHRDEYRTEFTTALQRVDLFMGQFSE

SEQ ID NO: 324 - protein, 50 aa, Homo sapiens
VIMERIGLATAGIKYEARLHVLKVNHQTVLEALQQLIRVTQPELIQTHKS

SEQ ID NO: 325 - protein, 50 aa, Homo sapiens
YRAVIIHGFVEELVVNEDPEYQWIDQIRTPRASNEARQRLISLMSGELQR

SEQ ID NO: 326 - protein, 50 aa, Homo sapiens
TEMCERSPDMLAHFRKNEKLVPQLVCILKNLIMSGYSPEHDVSGISDPFL

SEQ ID NO: 327 - protein, 50 aa, Homo sapiens
IGVLCYELLVGNPPFESASHNETYRHIVKVDLKFPASVPMGAQDLISKLL

SEQ ID NO: 328 - protein, 50 aa, Homo sapiens
GGMAEPWGNELASAAARGDLEQLTSVLQNNVNVNAQNGFGRTALQVMKLG

SEQ ID NO: 329 - protein, 50 aa, Homo sapiens
GGGGGGGGGGGGGMTEYKLVVVGAGPVGKSALTIQLIQNHFVDEYDPTIE

SEQ ID NO: 330 - protein, 50 aa, Homo sapiens
HNDDEQYAWESSAGGSFTVRTDTGEHMGRGTKVILHLKEDQTEYLEERRI

SEQ ID NO: 331 - protein, 50 aa, Homo sapiens
ETERIWYPPNHVFHIDESTRHNVLYIIRFYFPRWYCSGSNRAYRHGISRG

SEQ ID NO: 332 - protein, 50 aa, Homo sapiens
GRRDSSDDWEIPDGQITVGQRIGSGLFGTVYKGKWHGDVAVKMLNVTAPT

SEQ ID NO: 333 - protein, 50 aa, Homo sapiens
MGDLVDAEEYLVPQQGFFCPDPAPGTGGMVHHRHRSSSTRSGGGDLTLGL

SEQ ID NO: 334 - protein, 50 aa, Homo sapiens
YQQQQQSELQPPAPSEDIWKKFELLSTPPLSPSRRSGLCSPSYVAVTPFS

SEQ ID NO: 335 - protein, 50 aa, Homo sapiens
LEHYKFIVDYCEKHPEAAQEIEVELELSKEIVSLLPTKMERFRTKMALTG

SEQ ID NO: 336 - protein, 50 aa, Homo sapiens
TNCLRPDTSLHSPERERHSRKSERSIIQKQTRKGTASDAERMHRQRSPTQ

SEQ ID NO: 337 - protein, 50 aa, Homo sapiens
IAPLFYSLQKSVLGVITIVNLRGALHKFRDLPKMWSISRMDTVIWFVTML

SEQ ID NO: 338 - protein, 50 aa, Homo sapiens
HKQTSVAPRHQEYLFEGHLCVLEPSISAQHIAHTTASSPLTLFSTAIPKG

SEQ ID NO: 339 - protein, 50 aa, Homo sapiens
LRRQVTVSADSSASMNSGVLLVRPSLLSSSGTPMLAGVSEYELPEDPRWE

SEQ ID NO: 340 - protein, 50 aa, Homo sapiens
GGGGGGGGGMKISVAAIPFFLLITITLGTKTESSSRGPYHPSECCFTYTT

SEQ ID NO: 341 - protein, 50 aa, Homo sapiens
PSPAGTRANNTLLDSRGWGTLLSRSCAGLAGEIAGVNWESGYLVGIKRQR

SEQ ID NO: 342 - protein, 50 aa, Homo sapiens
GTPMGPYNPAPYNPGPPGPAPHGPPDPYAPQGWGNAYPHWQQQAPPDPAK

SEQ ID NO: 343 - protein, 50 aa, Homo sapiens
TDVDPLVEALLICHGREPQEILQPELFEAVNEAILLKKISLPMSAVVCLW

SEQ ID NO: 344 - protein, 50 aa, Homo sapiens
GMDKVQSGFLILFLFLMECQLHLCLSYADGLHPTGNITGLPGSKRSQPPR

SEQ ID NO: 345 - protein, 50 aa, Homo sapiens
KIFRHSSLLIEHQALHAGEEPYKCNKRGKSFRHNSTLKIHQRVHSGEKPY

SEQ ID NO: 346 - protein, 50 aa, Homo sapiens
GGGGGGGGMDADEGQDMSQVSGKESHPVSDTPDEGDEPMPIPEDLSTTSG

SEQ ID NO: 347 - protein, 50 aa, Homo sapiens
YQNDIALIEMKKDGNKKDCELPRSITACVPWSPYLFQPNDTCIVSGWGRE

SEQ ID NO: 348 - protein, 50 aa, Homo sapiens
VKSTTSLTSSSTSGSSDKVYAHQMVCTDSREQKLDAFLQPLSKPLSSQPQ

SEQ ID NO: 349 - protein, 50 aa, Homo sapiens
SSMEPSADWLATAAARGRVEEVRALPNAPNSYGRRPIQVMMMGSARVAEL

SEQ ID NO: 350 - protein, 50 aa, Homo sapiens
PNAPNSYGRRPIQVMMMGSARVAELNCADPATLTRPVHDAAREGFLDTLV

SEQ ID NO: 351 - protein, 50 aa, Homo sapiens
YTLLSGVNRHSTAIGRVWLSVIFIFIFRIMVLVVAAESVWGDEKSSFICN

SEQ ID NO: 352 - protein, 50 aa, Homo sapiens
SGGGHGGGHGGSSGGGYGGGSSGGGYGGGSSSGGHGGSSSGGYGGGSSGG

SEQ ID NO: 353 - protein, 50 aa, Homo sapiens
YGGGSSGGGSSSGGGYGGGSGLRRRIRRRQPSGGHKSSSSGSVGESSSKG

SEQ ID NO: 354 - protein, 50 aa, Homo sapiens
AGGFGGRGGGFGGGSSFGGGSGFGGGSGFSGGGFGGGGFGGGRFGGFGGP

SEQ ID NO: 355 - protein, 50 aa, Homo sapiens
ISVAGGGGGFGAAGGFGGRGGGFWRRQRLGGGSSFGGGSGFSGGGFGGGG

SEQ ID NO: 356 - protein, 50 aa, Homo sapiens
SCPRSGREQGQDGTAGAPGLLWMGLALALALALALSDSRVLWAPAEAHPL

SEQ ID NO: 357 - protein, 50 aa, Homo sapiens
SKEERETLVEECNRAECIQRGVSPSSNLVTEVRVYNWFANRRKEEAFRHK

SEQ ID NO: 358 - protein, 50 aa, Homo sapiens
KRARARIAKGLRLCRPKAKAKAKAKAKDQTKAQAAAPASVPAQAPKRTQA

SEQ ID NO: 359 - protein, 50 aa, Homo sapiens
YIAHPKLGKRARARIAKGLRLCRPKGQAKAKAKAKDQTKAQAAAPASVPA

SEQ ID NO: 360 - protein, 50 aa, Homo sapiens
SGCGGCGSGCGGCGSGCGGCGSGCGGCGGCGSGCCVPVCCCKPMCCCVPA

SEQ ID NO: 361 - protein, 50 aa, Homo sapiens
KVNKAGMEKEKAEEKLAGEELAGEEAPQEKAEDKPSTDLSAPVNGEATSQ

SEQ ID NO: 362 - protein, 50 aa, Homo sapiens
EEMDVAEENRAIDEVNREAGPGPGPLNVGLHLNPLESIQLELDSVNAEAD

SEQ ID NO: 363 - protein, 50 aa, Homo sapiens
INFLAKSKMISLSECMVQFFSLVTTECFLLATMAYDRYVAICKALLYPVI

SEQ ID NO: 364 - protein, 50 aa, Homo sapiens
KGGCGSCGGSKGGCGSCGGSKGGCGSGCGGCGSSCCVPVCCCKPMCCCVP

SEQ ID NO: 365 - protein, 50 aa, Homo sapiens
ARTDQKPPCRGGCWGQPGHPNTGGAHPTYHPMGHRPRTCILLRGDQTTGG

SEQ ID NO: 366 - protein, 50 aa, Homo sapiens
GRWLDLLGILVSLLGELWCLVGVRRSLLDLCQIQDFPSQRPPVSTPSQPL

SEQ ID NO: 367 - protein, 50 aa, Homo sapiens
PPTPKSSPQKTRKSPQVTRGSPQKTRQSPQTLKRSRVTTSLEALPTGTVL

SEQ ID NO: 368 - protein, 50 aa, Homo sapiens
LKASPKKAPGTKGTAAAAAAAAAALLLKVPAKKITAASKKAPAQKVPAQK

SEQ ID NO: 369 - protein, 50 aa, Homo sapiens
KASPKKAPGTKGTAAAAAAAAAALLLLLKVPAKKITAASKKAPAQKVPAQ

SEQ ID NO: 370 - protein, 50 aa, Homo sapiens
RSPPVGSGPASGVEPTSFPVESEAAMMEDVLRPLEQALEDCRGHTRKQVC

SEQ ID NO: 371 - protein, 50 aa, Homo sapiens
CPLCPDRGPAEAQTQAEGQGQGQGQGQGQGQGQGQGQGQGRRPGLVSAVL

SEQ ID NO: 372 - protein, 50 aa, Homo sapiens
CPLCPDRGPAEAQTQAEGQGQGQGQGQGQGQGQGQGRRPGLVSAVLAEAS

SEQ ID NO: 373 - protein, 50 aa, Homo sapiens
QAQAQAQAQAQAQAQAQAQAQAQAQAQAQAQAQAQAQAQAQAQAQVQAQV

SEQ ID NO: 374 - protein, 50 aa, Homo sapiens
VDYYATALKSRAYSVEDFQPENLESGGVFRNGTCTSRITSSEPGPRRALG

SEQ ID NO: 375 - protein, 50 aa, Homo sapiens
IPSSDCHPRRHSHEDQEFRCRSSDRLPRRNSHEDQEFRCRSHVRDYRKYS

SEQ ID NO: 376 - protein, 50 aa, Homo sapiens
IPSSDCHPRRHSHEDQEFRCRSSDRLPRRPSHEDQEFRCRSHVRDYRKYS

SEQ ID NO: 377 - protein, 50 aa, Homo sapiens
IPSSDCHPRRHSHEDQEFRCRSSDRLPRTHSHEDQEFRCRSHVRDYRKYS

SEQ ID NO: 378 - protein, 50 aa, Homo sapiens
GNTKIPEPGCTKVPEPGCTKVPEPGCTKVPEPGCTKVPEPGCTKVPEPGY

SEQ ID NO: 379 - protein, 50 aa, Homo sapiens
HNFSPAYQHYTQQATHEAPRPGTHPRSGGSGGSRKSRSLEKRMLIPSEDL

SEQ ID NO: 380 - protein, 50 aa, Homo sapiens
LQRMLPSLSLTEDVKWPPTLQPPTLQPPVVLGPPAPDPSPLAPPPGNPAG

SEQ ID NO: 381 - protein, 50 aa, Homo sapiens
GPHMTPYSLLKEDVKWPPTLQPPTLQPPVVLGPPAPDPSPLAPPPGNPAG

SEQ ID NO: 382 - protein, 50 aa, Homo sapiens
PAGPQESAAEPTPAVPLKPAQEPPPEHPQDPIEAPPSLYSCDDCGRSFRL

SEQ ID NO: 383 - protein, 50 aa, Homo sapiens
SLTAHGAPERPLAATSAAPPPQPQPPPQPEPRSVPQPEPEPEPEREATPT

SEQ ID NO: 384 - protein, 50 aa, Homo sapiens
LERRAKQKANQQRQQQQLPQQQQQQSPPQQPPQQPQQQDSVWGMNHSTLH

SEQ ID NO: 385 - protein, 50 aa, Homo sapiens
FCKMILSNPKFAEHGETLAMKGLTLKKKEEAYEFVRKGLRNDVKSHVCWH

SEQ ID NO: 386 - protein, 50 aa, Homo sapiens
CKMILSNPKFAEHGETLAMKGLTLKKKNCLGKKEEAYEFVRKGLRNDVKS

SEQ ID NO: 387 - protein, 50 aa, Homo sapiens
NMGSLSQTPGHKAEQQQQQQQQQQQHQQQQQQQQQQQQQQHLSRAPGLIT

SEQ ID NO: 388 - protein, 50 aa, Homo sapiens
GKTFRQKSNLSTHQGTHTGEKPYVCGKTFHRKSFLTIHQRTHTGKNRMDV

SEQ ID NO: 389 - protein, 50 aa, Homo sapiens
KTFYDKTVLTIHQRTHTGEKPFECKKTFSQKSKLFVHHRTHTGEKPFRCN

SEQ ID NO: 390 - protein, 50 aa, Homo sapiens
QARGLRRGNAGRRLELPAVPEPPRSAGAPEGLDSGSGKAHLRAISSREQV

SEQ ID NO: 391 - protein, 50 aa, Homo sapiens
EPISPPRDRMTPSGFQQQQQQQQQQPPPPQPQPQPPQPQPRQEMGRSPVD

SEQ ID NO: 392 - protein, 50 aa, Homo sapiens
RPASLSSASSTPASSSTSASSASSPPPCAAAAAAAALAGLSALPVSQLPV

SEQ ID NO: 393 - protein, 50 aa, Homo sapiens
VCCPQTKIIGSVSKEEEEEDEEEEEDEEEDYDVYKSEFPTEADLEDFTEA

SEQ ID NO: 394 - protein, 50 aa, Homo sapiens
EEKRQEQEEKMWKQEEKIREQEEKIREQEEMTQEQEEKMGEQEEKMCEQE

SEQ ID NO: 395 - protein, 50 aa, Homo sapiens
EKIREQEEMWREEEKMHEQEKIWEEDKMWRQEEKIREQEEKVWRQEEKIR

SEQ ID NO: 396 - protein, 50 aa, Homo sapiens
ELEKVRMEFELTRLKYLHEKNQRQRERQHEVVMEQLQRERQHEVVMEQLQ

SEQ ID NO: 397 - protein, 50 aa, Homo sapiens
DRYGEEGCYEEYRGRSPDAHSGGRRPTPNSSSNSYGQSHHYGGEGRYEEY

SEQ ID NO: 398 - protein, 50 aa, Homo sapiens
RYGEEGCYEEYRGRSPDAHSGGRRPTPTNSSSNSYGQSHHYGGEGRYEEY

SEQ ID NO: 399 - protein, 50 aa, Homo sapiens
GRSSSSNGYSRSDRYGEEGCYEEYTPTARGRSPDAHSGGRNSSSNSYGQS

SEQ ID NO: 400 - protein, 50 aa, Homo sapiens
VVVREQPESHTWVKEGKRPWGEMKEPPWDPKGPPKVPFRSKPTSASLKRE

SEQ ID NO: 401 - protein, 50 aa, Homo sapiens
HLANHHRIHTGEKPYKCNECGKVFSYRNAHLARHQKIHSGEKPYKCKECG

SEQ ID NO: 402 - protein, 50 aa, Homo sapiens
LPQGHPLPKSFSSPPSPSNKREEEEVNFEVIPPPPEFSNDPEPPAPALQY

SEQ ID NO: 403 - protein, 50 aa, Homo sapiens
AEGGVTSEDYRTFLQTAAKAATAAAAAAAGSSSSSSSSRGPIRTEFTSMG

SEQ ID NO: 404 - protein, 50 aa, Homo sapiens
MRMAEGGVTSEDYRTFLQTAAKAATSSSSSRAAAAAAAGGPIRTEFTSMG

SEQ ID NO: 405 - protein, 50 aa, Homo sapiens
TFLQQPSGNMDDSGFFSIQTAAKAATAAAAAAAGSSSSSGPIRTEFTSMG

SEQ ID NO: 406 - protein, 50 aa, Homo sapiens
FLQQPSGNMDDSGFFSIQTAAKAATSSSSSRAAAAAAAGGPIRTEFTSMG

SEQ ID NO: 407 - protein, 50 aa, Homo sapiens
LQQPSGNMDDSGFFSIQTAAKAATSSSSSSRAAAAAAAGGPIRTEFTSMG

SEQ ID NO: 408 - protein, 50 aa, Homo sapiens
HEKQPSGNMDDSGFFSIQTAAKAATAAAAAAAGSSSSSSGPIRTEFTSMG

SEQ ID NO: 409 - protein, 50 aa, Homo sapiens
EKQPSGNMDDSGFFSIQTAAKAATAAAAAAAGSSSSSSSGPIRTEFTSMG

SEQ ID NO: 410 - protein, 50 aa, Homo sapiens
QPSGNMDDSGFFSIQTAAKAATAAAAAAAGSSSSSSSSRGPIRTEFTSMG

SEQ ID NO: 411 - protein, 50 aa, Homo sapiens
HEKQPSGNMDDSGFFSIQTAAKAATSSSSSRAAAAAAAGGPIRTEFTSMG

SEQ ID NO: 412 - protein, 50 aa, Homo sapiens
EKQPSGNMDDSGFFSIQTAAKAATSSSSSSRAAAAAAAGGPIRTEFTSMG

SEQ ID NO: 413 - protein, 50 aa, Homo sapiens
SFICNYKEHWFTVRKLGKQTAAKAATAAAAAAAGSSSSSGPIRTEFTSMG

SEQ ID NO: 414 - protein, 50 aa, Homo sapiens
FICNYKEHWFTVRKLGKQTAAKAATAAAAAAAGSSSSSSGPIRTEFTSMG

SEQ ID NO: 415 - protein, 50 aa, Homo sapiens
ICNYKEHWFTVRKLGKQTAAKAATAAAAAAAGSSSSSSSGPIRTEFTSMG

SEQ ID NO: 416 - protein, 50 aa, Homo sapiens
NYKEHWFTVRKLGKQTAAKAATAAAAAAAGSSSSSSSSRGPIRTEFTSMG

SEQ ID NO: 417 - protein, 50 aa, Homo sapiens
FICNYKEHWFTVRKLGKQTAAKAATSSSSSRAAAAAAAGGPIRTEFTSMG

SEQ ID NO: 418 - protein, 50 aa, Homo sapiens
ICNYKEHWFTVRKLGKQTAAKAATSSSSSSRAAAAAAAGGPIRTEFTSMG

SEQ ID NO: 419 - protein, 50 aa, Homo sapiens
GGGGGGGGGGMESIFHEKTAAKAATAAAAAAAGSSSSSSGPIRTEFTSMG

SEQ ID NO: 420 - protein, 50 aa, Homo sapiens
GGGGGGGGGMESIFHEKTAAKAATAAAAAAAGSSSSSSSGPIRTEFTSMG

SEQ ID NO: 421 - protein, 50 aa, Homo sapiens
GGGGGGGMESIFHEKTAAKAATAAAAAAAGSSSSSSSSRGPIRTEFTSMG

SEQ ID NO: 422 - protein, 50 aa, Homo sapiens
GGGGGGGGGGMESIFHEKTAAKAATSSSSSRAAAAAAAGGPIRTEFTSMG

SEQ ID NO: 423 - protein, 50 aa, Homo sapiens
GGGGGGGGGMESIFHEKTAAKAATSSSSSSRAAAAAAAGGPIRTEFTSMG

SEQ ID NO: 424 - protein, 50 aa, Homo sapiens
DTIAWRESQEEERKTGEEEGEEERKRRRGKEDKKIVMEETEEKAGEVQEK

SEQ ID NO: 425 - protein, 50 aa, Homo sapiens
NNGSSSGGSSSGSSSGGSSGGSSGQQQWGSSGNSGGSRGDSGSESSWGSS

SEQ ID NO: 426 - protein, 50 aa, Homo sapiens
CQPTCCRNTSCQPTCCGSSCCQPAVGPACCHPTCCQTICRSTCCQPSCVT

SEQ ID NO: 427 - protein, 50 aa, Homo sapiens
EFKAMEEKVKAMEKEMKFYQGSVDRDQEKLHSLSQELEQYKIDNKSKTER

SEQ ID NO: 428 - protein, 50 aa, Homo sapiens
PPATCLLCLSCLSGFRHGPWRSAGSSLGRQALPSDLVAPLFVSYTVEVSI

SEQ ID NO: 429 - protein, 50 aa, Homo sapiens
EGSETTTASTAGSETTTASTAGSETNTACTTGSETSTPSSAGSETNTAFI

SEQ ID NO: 430 - protein, 50 aa, Homo sapiens
HSHLPELHMFQTKGKISNQLDKSIGCASSASESQRISCRLKTHISNKYGK

SEQ ID NO: 431 - protein, 50 aa, Homo sapiens
PSEEDSPREEDPPGEEDLPGEEDLPEVKPKSEEEGSLKLEDLPTVEAPGD

SEQ ID NO: 432 - protein, 50 aa, Homo sapiens
RARTTRDARGHVHEQHGTRAGTCTNKGRAQARARTRDARRHVHEHRTHTA

SEQ ID NO: 433 - protein, 50 aa, Homo sapiens
REAESGEEPARRHRARHKAQPAHEAAEKEATEKEAEIVEADKEKELRNHQ

SEQ ID NO: 434 - protein, 50 aa, Homo sapiens
RLKRTGATGERAKEGISINCGLLALGDQSKKVVHVPYRDSKLTRLLQDSL

SEQ ID NO: 435 - protein, 50 aa, Homo sapiens
KPDPDQTFKFTSLQNFSNCLPNSCSPTQVPNHSLSHRQPETVLTETPQDT

SEQ ID NO: 436 - protein, 50 aa, Homo sapiens
GRVLLDEPPEEEDGLRGGPPPAAAAQAQVQGASFRGWKEVTSLFNKDDEQ

SEQ ID NO: 437 - protein, 50 aa, Homo sapiens
VESFKTKVSYLKQKGLGGAMVGGTGRGHGLALDLDDFAGFSCNQGRYPLI

SEQ ID NO: 438 - protein, 50 aa, Homo sapiens
EASSACSTDWGVLSEEQIRKKKIRNRQQQESQSQSQSPVGPQGSSSSASG

SEQ ID NO: 439 - protein, 50 aa, Homo sapiens
RGGSGGFTAPVGGPDGTVPMPMPMPMPSANTPFSYPLPKGPVDDINADKN

SEQ ID NO: 440 - protein, 50 aa, Homo sapiens
ERIMREEKRRLFTPLSPAAAAAAAAASAPSAGSSSSCSSASLPASPAPRA

SEQ ID NO: 441 - protein, 50 aa, Homo sapiens
LNKMFCQLAKTCPVQLWVDSTPPPGVRAMAIYKQSQHMTEVVRRCPHHER

SEQ ID NO: 442 - protein, 50 aa, Homo sapiens
KMFCQLAKTCPVQLWVDSTPPPGTRAMAIYKQSQHMTEVVRRCPHHERCS

SEQ ID NO: 443 - protein, 50 aa, Homo sapiens
VVVPYEPPEVGSDCTTIHYNYMCNSLNRRPILTIITLEDSSGNLLGRNSF

SEQ ID NO: 444 - protein, 50 aa, Homo sapiens
LGAGIPGLGVGVGVPGLGVGAGVPGFGAVPGALAAAKAAKYGAAVPGVLG

SEQ ID NO: 445 - protein, 50 aa, Homo sapiens
LGAGIPGLGVGVGVPGLGVGAGVPGFGAGADEGVRRSLSPELREGDPSSS

SEQ ID NO: 446 - protein, 50 aa, Homo sapiens
TYMASCPVPAGPGGVGAAGGGGGGETYGPDSSSSPVPSSPAMASAIECHS

SEQ ID NO: 447 - protein, 50 aa, Homo sapiens
IGQKGEIGPMGIPGPQGPPGPHGLPGGPGLPGQPGPKGDRGPKGLPGPQG

SEQ ID NO: 448 - protein, 50 aa, Homo sapiens
DLMELDMAMEPDRKAAVSHWQQQSYHSGATTTAPSLSGKGNPEEEDVDTS

SEQ ID NO: 449 - protein, 50 aa, Homo sapiens
NKSISMSVAGSRQGACFGGAGGFGSWFRTGGFGGGFGGSFSGKGGPGFPV

SEQ ID NO: 450 - protein, 50 aa, Homo sapiens
MSVAGSRQGACFGGAGGFGTGGFGGRGFGGSFSGKGGPGFPVCPAGGIQE

SEQ ID NO: 451 - protein, 50 aa, Homo sapiens
SIHGGSGGRGVSVSSARFVSSSSSGGYGGVLTASDGLLAGNEKLTMQNLN

SEQ ID NO: 452 - protein, 50 aa, Homo sapiens
SSTGAADQVDPGAAAAAAAAAAAAPAAPPAPPAPAFPPQLPPHIATEIDR

SEQ ID NO: 453 - protein, 50 aa, Homo sapiens
RPPSPLLPVAAAAAAAAAALVPGSGSGPGPAPFLAPVAAPVGGISFHLQI

SEQ ID NO: 454 - protein, 50 aa, Homo sapiens
AGPAALAARAGPGPGPGPGPGPGPGKPAGPGAAQTLNGSAALLNSHHAAA

SEQ ID NO: 455 - protein, 50 aa, Homo sapiens
AEAEEVKTGKCATVSAAVAERESAEGVVKEGLAEKEVMEEQMEVEEQPPE

SEQ ID NO: 456 - protein, 50 aa, Homo sapiens
VNSQLNCSVNGSSSYHSDDDDDDDDDDDNIDDDDGDNDHEALGVGDNSIP

SEQ ID NO: 457 - protein, 50 aa, Homo sapiens
ATCFVDAGNAFKKADPQEAINCLMHTGAIEIYTDMGRFTIAAKHHISIAE

SEQ ID NO: 458 - protein, 50 aa, Homo sapiens
GAPGAAGPGGPGGEPGKGGAAAAAAAGGLAAAGGPGQGWAPGPGPITSIP

SEQ ID NO: 459 - protein, 50 aa, Homo sapiens
VQSGTPEEPEPELEAEASKEAEPEPEPELEPEAEAEPEPELEPEPDPEPE

SEQ ID NO: 460 - protein, 50 aa, Homo sapiens
TCACPDQFKGKFCEIGSDDCYVGDGCYSYRGKMNRTVNQHACLYWNSHLL

SEQ ID NO: 461 - protein, 50 aa, Homo sapiens
QRIGSGSFGTVYKGKWHGDVAVKMLTPQQLQAFKNEVGVLRKTRHVNILL

SEQ ID NO: 462 - protein, 50 aa, Homo sapiens
MILLGSIERSQVVALLGAQLSPARRPRQHMQERRATQTSPLSDQEGPPTP

SEQ ID NO: 463 - protein, 50 aa, Homo sapiens
LRRWRLVSSPPSGVPGLALLALLALRLAAGTDCPCPEPELCRPIRHHPDF

SEQ ID NO: 464 - protein, 50 aa, Homo sapiens
PDSVSSWHLKRWTKVDTIAADESFPPPSSSSSSSSSSSAAWAVGPHGAGQ

SEQ ID NO: 465 - protein, 50 aa, Homo sapiens
KIPVAIKVLRENTSPKANKEILDEHTGGAYVMAGVGSPYVSRLLGICLTS

SEQ ID NO: 466 - protein, 50 aa, Homo sapiens
DLSTYPAYMHDAAAAAAAAAAAAAAIFPGAVPAARPPYPGAVYAGYAPPS

SEQ ID NO: 467 - protein, 50 aa, Homo sapiens
GYGLALPAYGAPPPGPAPHPHPHPHRPAFAFAAAAAAAPCQLSVPPGRAA

SEQ ID NO: 468 - protein, 50 aa, Homo sapiens
YGYGYGLALPAYGAPPPGPAPHPHPPRHPHAFAFAAAAAAAPCQLSVPPG

SEQ ID NO: 469 - protein, 50 aa, Homo sapiens
YGYGLALPAYGAPPPGPAPHPHPHPPRHAFAFAAAAAAAPCQLSVPPGRA

SEQ ID NO: 470 - protein, 50 aa, Homo sapiens
ALHSTSPGSSAPIAPSASSPSSSSNVAGGGGGGGGGGGGGGGRSSSSSSS

SEQ ID NO: 471 - protein, 50 aa, Homo sapiens
EIEGERELPEVSRRELDLLIAEEEEPILLEIPRLPPPAPAEVEGIGEALG

SEQ ID NO: 472 - protein, 50 aa, Homo sapiens
EEPPALPPRTLEGLQVEEEPVYEAGAGAEPEPEPEPEPEPENDYEDVEEM

SEQ ID NO: 473 - protein, 50 aa, Homo sapiens
EPPALPPRTLEGLQVEEEPVYEAGARAGPEPEPEPEPEPENDYEDVEEMD

SEQ ID NO: 474 - protein, 50 aa, Homo sapiens
FLLPNFADSHHRSILLASSGGGNGAAAGGGGGAGGGSGGGNGAGGGGAGG

SEQ ID NO: 475 - protein, 50 aa, Homo sapiens
VGGERDGLLCGETGGGGGSALGPGGAGGGGGGGGGGGGPGHEQEEDYRYE

SEQ ID NO: 476 - protein, 50 aa, Homo sapiens
NCSQDEYFDHEEGVCVPCMPPTTPQLPTTGSRPTQVWPMTGTSTTIGLLS

SEQ ID NO: 477 - protein, 50 aa, Homo sapiens
SMYLPAGEGGDPAAAAAAAAQSRLHSLPQHYQGAGAGVGVNGTVPLTHIG

SEQ ID NO: 478 - protein, 50 aa, Homo sapiens
SLAGGLLAAGAGGGGAAVAMGVGVGAAAVGQRLESPGGAAGGGYAHVNGW

SEQ ID NO: 479 - protein, 50 aa, Homo sapiens
PRASALPAPPTGSALPDPQTASALPAALAVISFLLGLGLGVACVLARTQI

SEQ ID NO: 480 - protein, 50 aa, Homo sapiens
RLCDLRLFQPFLKVIEPVGNREEKIREIGFAIGMPVCEFDMVKDPEVQDF

SEQ ID NO: 481 - protein, 50 aa, Homo sapiens
SRMEDENNRLRLESKRLGGDDARVRSWELELELDRLRAENLQLLTENELH

SEQ ID NO: 482 - protein, 50 aa, Homo sapiens
DENNRLRLESKRLGGDDARVRELELDRLRAENLQLLTENELHRQQERAPL

SEQ ID NO: 483 - protein, 50 aa, Homo sapiens
SFSLSAEDYEMKKIIVTDSDDDDDDIVIFCSEILPTKETLPSNNTVAQVQ

SEQ ID NO: 484 - protein, 50 aa, Homo sapiens
EKAAAAAAAAAARVFFPQSAAAAAAAAAGSPYSLLDLGSKMAEISSSSSG

SEQ ID NO: 485 - protein, 50 aa, Homo sapiens
RKQQLKRDQEEERRERWLKLEEEGEARAAERREQQERREQQLRREQEERR

SEQ ID NO: 486 - protein, 50 aa, Homo sapiens
KCKEAGMREQCVLSEEQIRKKKIRNRQQQESQSQSQSPVGPQGSSSSASG

SEQ ID NO: 487 - protein, 50 aa, Homo sapiens
AKREAEQKAREEREREKEKEKEREREREREAERAAKASSSAHEGRLSDPQ

SEQ ID NO: 488 - protein, 50 aa, Homo sapiens
TSKVSNIAQVTLFIPQANPDDIDPTPTPTPTPDKSHNSGVNISTLVLSVI

SEQ ID NO: 489 - protein, 50 aa, Homo sapiens
QPEEASAEEERPEDQQEEEAAAAAARYLDELPEPLLLRVLAALPAAELVQ

SEQ ID NO: 490 - protein, 50 aa, Homo sapiens
LEQSLQPGLQVARWGGVALPREHIEAGGGPSDPSEFGTEFRAPPRSAAAS

SEQ ID NO: 491 - protein, 50 aa, Homo sapiens
VWHLVRPTDEVDEGKSKRGSVKEKEKAITEIYLTRLLSVKGTLQQFVDNF

SEQ ID NO: 492 - protein, 50 aa, Homo sapiens
RVWHLVRPTDEVDEGKSKRGSVKEIFGERTKAITEIYLTRLLSVKGTLQQ

SEQ ID NO: 493 - protein, 50 aa, Homo sapiens
EDDGEDEDDEDDDDDDDDDDDDDDEGDDEDEEDGEEENQKRYYLRQRKAT

SEQ ID NO: 494 - protein, 50 aa, Homo sapiens
SDSSDSSDSSDSSNSSDSSNSSDSSDSSDSSDSSDSSDSSNSSDSSDSSD

SEQ ID NO: 495 - protein, 50 aa, Homo sapiens
DSSDSSNSNSSDSDSSNSSDSSDSSDSSDSSNSSDSSDSSDSSNSSDSSD

SEQ ID NO: 496 - protein, 50 aa, Homo sapiens
DSSNSSDSSDSSDSSDSSNSSDSSNSSDSSDSSDSSDSSDSSDSSDSSDS

SEQ ID NO: 497 - protein, 50 aa, Homo sapiens
SSNSSDSSDSSDSSDSSSSSDSSVAVTAANSSDSSDSSDSSNSSESSDSS

SEQ ID NO: 498 - protein, 50 aa, Homo sapiens
PSACSDHPIPGCSLKEEEKQHSQPQRQQQLDPNNPAANWIHARSTRKKRC

SEQ ID NO: 499 - protein, 50 aa, Homo sapiens
LSTTKSHRTVVTMDESTSSVMTKIIREDEKPVDLTAGRRAVCCDVVYKLP

SEQ ID NO: 500 - protein, 50 aa, Homo sapiens
ECALLRRARGPPPGAEEKEKEKEKEPDNVDLVSELRAENQRLTASLRELQ

SEQ ID NO: 501 - protein, 50 aa, Homo sapiens
GEFRGPCGGGEPEPEPEPEPEPEPDPKSEPEPEPELVEAEAAEASVEEPG

SEQ ID NO: 502 - protein, 50 aa, Homo sapiens
PQASPEEMQEPPAATEEEEEEEEEERRGSGEGTTISPVNLAPFPEAEFWA

SEQ ID NO: 503 - protein, 50 aa, Homo sapiens
ANPRGRPKMGSRSTSESRSRSRSRSRSRSASSNSRKSLSPGVSRDSSTSY

SEQ ID NO: 504 - protein, 50 aa, Homo sapiens
GSRGAAGPRRGVLQLLPLPLPLPLLAALLLLLRPGAGRAAAQGEAEAPTL

SEQ ID NO: 505 - protein, 50 aa, Homo sapiens
KIHVTPLIPGKSQSVSVSGPGPGPGLCPGPNVLLNQQNPPAPQPQHLARR

SEQ ID NO: 506 - protein, 50 aa, Homo sapiens
PEPDTEPDSTAAVPSQPAPSAATTTAVTAAAASDDSPSEDEQEAVQEVPR

SEQ ID NO: 507 - protein, 50 aa, Homo sapiens
EPDTEPDSTAAVPSQPAPSAATTTTVTAAAASDDSPSEDEQEAVQEVPRV

SEQ ID NO: 508 - protein, 50 aa, Homo sapiens
SLCHQITAACKHGGDLYVVGGSIPRPRRMWKCNNATVDWEWCAPLPRDRL

SEQ ID NO: 509 - protein, 50 aa, Homo sapiens
NKDLCASRSADQTVLCQSEWLKYQGNCYWFSNEMKSWSDSYVYCLERKSH

SEQ ID NO: 510 - protein, 50 aa, Homo sapiens
LSVCGRTLSLDLATSAASGMKVQGDPGGKTGTEGKSRGSSSSSSSSRCLG

SEQ ID NO: 511 - protein, 50 aa, Homo sapiens
RWYQYFTKTVFLSGLPPPPAEPEPEPEPEPALDLAALRAVACDCLLQEHF

SEQ ID NO: 512 - protein, 50 aa, Homo sapiens
PLGGDFGGGDFGGGDFGGGDFGGGDFGGGGSFGGHCLDYCESPTAHCNVL

SEQ ID NO: 513 - protein, 50 aa, Homo sapiens
SAKPFFSPSHIALKNMMLKDMEDTGGYDDDDDDDDDDDDDEDNSLFPTRE

SEQ ID NO: 514 - protein, 50 aa, Homo sapiens
SAKPFFSPSHIALKNMMLKDMEDTGYDDDDDDDDDDDDDEDNSLFPTREP

SEQ ID NO: 515 - protein, 50 aa, Homo sapiens
FFSPSHIALKNMMLKDMEDTDDDDEFDDDDDDDDDEDNSLFPTREPRSHF

SEQ ID NO: 516 - protein, 50 aa, Homo sapiens
APLQSMQQNQDPEVFVQPKVLSSASPVAGAPLVTATTTAVSSVLLAPSVF

SEQ ID NO: 517 - protein, 50 aa, Homo sapiens
LAPLQSMQQNQDPEVFVQPKVLSSAIPVAGAPLVTATTTAVSSVLLAPSV

SEQ ID NO: 518 - protein, 50 aa, Homo sapiens
LPVTGLSSASTGDTTPLPVTDTSSASTDDTTRLPVTDVSSASTGHATPLP

SEQ ID NO: 519 - protein, 50 aa, Homo sapiens
SLPVTDTSSSSTGDTTPLLVTETSSASTGHATPLHVTSPSSASTGDTTPV

SEQ ID NO: 520 - protein, 50 aa, Homo sapiens
GRSLVSSPDSWGSTPADSPVASPAAEPRRPGTLRDPRAPSVGRRGARSSR

SEQ ID NO: 521 - protein, 50 aa, Homo sapiens
PSDKDCGRSLVSSPDSWGSTPADKPRAGPVASPARPGTLRDPRAPSVGRR

SEQ ID NO: 522 - protein, 50 aa, Homo sapiens
KLMQQKQQQQQQQQQQQQQQQQQQQQHSNQTSNWSPLGPPSSPYGAAFTA

SEQ ID NO: 523 - protein, 50 aa, Homo sapiens
LMQQKQQQQQQQQQQQQQQQQQQQQQHSNQTSNWSPLGPPSSPYGAAFTA

SEQ ID NO: 524 - protein, 50 aa, Homo sapiens
HLLLVDGFSQPYLPLPEAAPAQAQADLLTVYLVVALASVSSLFLLSVLLF

SEQ ID NO: 525 - protein, 50 aa, Homo sapiens
EENVKGQGEKKEESEEEDEKEEEEEGREEKLEEEKEEKEAQEEQESLSVG

SEQ ID NO: 526 - protein, 50 aa, Homo sapiens
EENVKGQGEKKEESEEEDEKEEEEDRREEKLEEEKEEKEAQEEQESLSVG

SEQ ID NO: 527 - protein, 50 aa, Homo sapiens
SQSSCCKPCSCSSGCGSSCCQSSCCKPCCCSSGCGSSCCQSSCCKPCCSQ

SEQ ID NO: 528 - protein, 50 aa, Homo sapiens
EVKSPEKAKSPTKEEAKSPEKAKSPEKAKSPVKAEAKSPEKAKSPVKAEA

SEQ ID NO: 529 - protein, 50 aa, Homo sapiens
KSPEKAKSPTKEEAKSPEKAKSPEKAKSPEKAKSPVKAEAKSPEKAKSPV

SEQ ID NO: 530 - protein, 50 aa, Homo sapiens
RSRDRKPGSHASSSARRRSRSRSRSTRRRSRSTDRRRGGSRRSRSREKRR

SEQ ID NO: 531 - protein, 50 aa, Homo sapiens
SARHRPPSTALQAHSPALPAPHAHAPALAAAAAAAAAAAAPHHLPAMVLG

SEQ ID NO: 532 - protein, 50 aa, Homo sapiens
LLEEKLRYLQQQLQDETPRRQEAELQEPEEKQEPEEKQKPEAGLSWNSLG

SEQ ID NO: 533 - protein, 50 aa, Homo sapiens
FGFELKQFDRKHHTYILINKLKPLEGEEEEEDLGGDGPRLGLLMMILGLI

SEQ ID NO: 534 - protein, 50 aa, Homo sapiens
FGFELKQFDRKHHTYILINKLKPLGKEEEEEDLGGDGPRLGLLMMILGLI

SEQ ID NO: 535 - protein, 50 aa, Homo sapiens
GFELKQFDRKHHTYILINKLKPLEEGEEEEDLGGDGPRLGLLMMILGLIY

SEQ ID NO: 536 - protein, 50 aa, Homo sapiens
LKQFDRKHHTYILINKLKPLEEEEEGEDLGGDGPRLGLLMMILGLIYMRG

SEQ ID NO: 537 - protein, 50 aa, Homo sapiens
QRGAGLAPVMGQPLRDGGRQHSGPRRTQAQLLRVGCVLGTCQVQNLSHRL

SEQ ID NO: 538 - protein, 50 aa, Homo sapiens
LRHSCSPMGDGDPEAMEESPRKKKKRKQETQRAVEEDGHLKCPRSAKPQD

SEQ ID NO: 539 - protein, 50 aa, Homo sapiens
IDKRVEVKPYVLDDQLCDECQGARCANVTCLQYYCEYCWAAIHSRAGREF

SEQ ID NO: 540 - protein, 50 aa, Homo sapiens
IMEMSDPTVEEEQALKAAQEQALGATEERGGGRGEEEGEEEEEGEETDDG

SEQ ID NO: 541 - protein, 50 aa, Homo sapiens
IMEMSDPTVEEEQALKAAQEQALGATEEEEEGEEEEEGEERGGGRGADDG

SEQ ID NO: 542 - protein, 50 aa, Homo sapiens
AVDEMNGKELNGKQIYVGRAQKKVELKRTFEQMKQDRITRYQVVNLYVKN

SEQ ID NO: 543 - protein, 50 aa, Homo sapiens
ECCCQPGCCGCCGSCCGCGGSGCGGSCCGSSCCGSGCGGCGGCGGCGGGC

SEQ ID NO: 544 - protein, 50 aa, Homo sapiens
TAPSLSALRSSKHSGGGGGGGGGGRRRRGADPAWTSALSGNSSGPGPGSS

SEQ ID NO: 545 - protein, 50 aa, Homo sapiens
CLAISGFDGTVQVYDATSWDGTRSQVEPLFTHRGHIFLDGNGMDPAPLVT

SEQ ID NO: 546 - protein, 50 aa, Homo sapiens
EEQEAALCAQGPKQASGAAAAAPAPAPVPVPAASLRPLSPGTPSGDADPG

SEQ ID NO: 547 - protein, 50 aa, Homo sapiens
VQADVSSAGPKAPMKFYIPRSQSTHEVLHPYVPVSFGPGGQLVHVGPSSP

SEQ ID NO: 548 - protein, 50 aa, Homo sapiens
RPITCCPSSCTAVVCRPCCWATTCCQPVSVQSPCGQPTPCSTTCRTSSCG

SEQ ID NO: 549 - protein, 50 aa, Homo sapiens
HPSCCISSCCRPYCCESSCCRPWLLPPHCCQTTCCRTTCCRTTCCCPSCC

SEQ ID NO: 550 - protein, 50 aa, Homo sapiens
DSVDAEGRVGDSVEAGDPAGDGVEAEGPAGDSMDAEGPAGRARRVSGEPQ

SEQ ID NO: 551 - protein, 50 aa, Homo sapiens
GFGGGRGMGGGFGGAGGFGGAGGFGGPGGFGGSGGFGGPGSLGSPGGFGP

SEQ ID NO: 552 - protein, 50 aa, Homo sapiens
SQRLGQQPLPRRPGHDDGQRPSGGAQLRRPRHSHPTRARRCPGGLPGHAG

SEQ ID NO: 553 - protein, 50 aa, Homo sapiens
RQAIPVLHSPTSPEPPDTTSPEPPNTTSPESPDTTSPESPDTTSQEPPDT

SEQ ID NO: 554 - protein, 50 aa, Homo sapiens
LLRRDGRFLAPRFAVEQRPNPGPGPGPTGAASAPQPPAPPDAGCFYTGAV

SEQ ID NO: 555 - protein, 50 aa, Homo sapiens
AASAAVLAPLGFTLRKPPAVGRNRRHPRGGSCLAAAHHRMRWRADGRSLE

SEQ ID NO: 556 - protein, 50 aa, Homo sapiens
RSEARRHRDSTSQHASSNSTSQQPSPESTPQQPSPESTPQHSSLETTSRQ

SEQ ID NO: 557 - protein, 50 aa, Homo sapiens
NSNGNAGPRPALNNNLTEPPGGGGGAAGSSDGVGAPPHSAAAALPPPAYG

SEQ ID NO: 558 - protein, 50 aa, Homo sapiens
DLEELVMTSRKESKEEKENQDEREVKEEEQEEEEVRSAENSSKSPKKGHG

SEQ ID NO: 559 - protein, 50 aa, Homo sapiens
KAAKMYTDKLETVPPLNELTEVPGEEKKKKKKKKDSVDTVAIKVEEDEKN

SEQ ID NO: 560 - protein, 50 aa, Homo sapiens
ESEEELEEEEEEEEVEEEEEEVEEEEEEVEEEEEEVEEEEEEVVEEELVG

SEQ ID NO: 561 - protein, 50 aa, Homo sapiens
PTAAPALPPALAADQAPAPSPAPGPGPIPGPAPTVAEPSPPVSAPAPAAA

SEQ ID NO: 562 - protein, 50 aa, Homo sapiens
FILLGLTDDPILRVILFMIILSHLPGNHIGNLSIIILIRISSQLHHPMYF

SEQ ID NO: 563 - protein, 50 aa, Homo sapiens
GIEEAHLERCCLRKLLRKLEELEELEELAKLHREDVLRQQRETRRPASHS

SEQ ID NO: 564 - protein, 50 aa, Homo sapiens
APCFNNVAEYESFLRTGVRGGGRGRARGAAAGSGVPAAPGPSGRTRRRPD

SEQ ID NO: 565 - protein, 50 aa, Homo sapiens
DFPAEIFLQRPKIVQSLLSLLKLAFWGDGKHRLALQSVSCLQQLCMYLRN

SEQ ID NO: 566 - protein, 50 aa, Homo sapiens
LQSALLQLPRLLGSAAEEEEEEEEGRNGKDGPTETLEELVLGLAAEVCDD

SEQ ID NO: 567 - protein, 50 aa, Homo sapiens
LQSALLQLPRLLGSAAEEEEEEEEGRHGKDGPTETLEELVLGLAAEVCDD

SEQ ID NO: 568 - protein, 50 aa, Homo sapiens
LQSALLQLPRLLGSAAEEEEEEEEGNGKDGPTETLEELVLGLAAEVCDDF

SEQ ID NO: 569 - protein, 50 aa, Homo sapiens
VLQSALLQLPRLLGSAAEEEEEEEEGDGKDGPTETLEELVLGLAAEVCDD

SEQ ID NO: 570 - protein, 50 aa, Homo sapiens
KSEWATHKFADCKAKRDTPTSCTVDFVNIEVWVEAENALGKVTSDHINFD

SEQ ID NO: 571 - protein, 50 aa, Homo sapiens
LVPAAARAELSRSDLSLIQQQQQQHKQQQQQQQKQLEEAEEERTEVPGAT

SEQ ID NO: 572 - protein, 50 aa, Homo sapiens
KCPPKCPPVSSCCSVSSGGCCGSALGAAASSGGCCSSGGGGCCSSGGGGC

SEQ ID NO: 573 - protein, 50 aa, Homo sapiens
YPPKCPSKCASSCPPPISSCCGSALGAAVSSGGCGCCSSEGGGCCLSHHR

SEQ ID NO: 574 - protein, 50 aa, Homo sapiens
VQLEETKTEEGLQEEGVQLEETKETAEGEGQQEEEAQLEEIEETGGEGLQ

SEQ ID NO: 575 - protein, 50 aa, Homo sapiens
PCYQQSSCQPDCCTSSPCQQACCVPVCCVPVCNKPVCFVPTCSESSPSCC

SEQ ID NO: 576 - protein, 50 aa, Homo sapiens
SMNPAFFPSFSPVSPHGCTGLSVPTASGGGGGGFGGPFSATAVPPPPPPA

SEQ ID NO: 577 - protein, 50 aa, Homo sapiens
IEEEEYLGKEGYLEEEEYLGKEEHLGKEGYLEKEDYIEEVDYLGKKAYLE

SEQ ID NO: 578 - protein, 50 aa, Homo sapiens
ICDGHWLLAEDRLFGLWHFCTTTNQVGTICFRDLGQAHVPGLAVGMGLVR

SEQ ID NO: 579 - protein, 50 aa, Homo sapiens
CDGHWLLAEDRLFGLWHFCTTTNQMCPICFRDLGQAHVPGLAVGMGLVRS

SEQ ID NO: 580 - protein, 50 aa, Homo sapiens
GSCDSCSDSWQVDDCPESCCEPPLLRPQCCAPAPCLSLVCTPVSRVSSPC

SEQ ID NO: 581 - protein, 50 aa, Homo sapiens
CDSCSDSWQVDDCPESCCEPPCCAPAPCLSLVCTPVSRVSSPCCPVTCEP

SEQ ID NO: 582 - protein, 50 aa, Homo sapiens
HQQQQQQQQQQQQQQQQQQQQQQHSNKQQQQHHHHHHHHLLQDAYMQQYQ

SEQ ID NO: 583 - protein, 50 aa, Homo sapiens
RSLRGEEPVPRERDRDPCGGSGGGAAAGGGGGGCSSSSSYCSFPPSLSSS

SEQ ID NO: 584 - protein, 50 aa, Homo sapiens
RPPPGPGPGNTTRFGSGAAGGSGSSNSSGDALVTRISILLRDLPTLKAAV

SEQ ID NO: 585 - protein, 50 aa, Homo sapiens
GTSAMTSSPSTTTARETPIVTVTPSASVSATDTTFHTTISSTTRTTERTP

SEQ ID NO: 586 - protein, 50 aa, Homo sapiens
GTSAMTSSPSTTTARETPIVTVTPSPSVSATDTTFHTTISSTTRTTERTP

SEQ ID NO: 587 - protein, 50 aa, Homo sapiens
TSAMTSSPSTTTARETPIVTVTPSSPVSATDTTFHTTISSTTRTTERTPL

SEQ ID NO: 588 - protein, 50 aa, Homo sapiens
EQEKMQEQEEKIWEQEEKIRDQEEIEWGQEKKMWQEEKMWGQEEMREKEE

SEQ ID NO: 589 - protein, 50 aa, Homo sapiens
RTTRPSAGITGTNGLSAEVTGTTGPSAGVTRTTGLSAGETGTTGLSPGVT

SEQ ID NO: 590 - protein, 50 aa, Homo sapiens
ERARWHQRMSKMSQEICTLKKEKQANMRWVEQLEWSLSKLKNQTAEPLPP

SEQ ID NO: 591 - protein, 50 aa, Homo sapiens
SRKEKVHHRKDEKRKEKWKHARVKEKEREHERRKRHREEQDKARREWERQ

SEQ ID NO: 592 - protein, 50 aa, Homo sapiens
PQPPALVAQQPPPPPQQQQQQQQQQAQQQQQREGPDGCNIFIYHLPQEFT

SEQ ID NO: 593 - protein, 50 aa, Homo sapiens
HLLMLPQDPSYPTMAMPSLLMMVNEETLLPYPGAFQASGQALPSQARNPG

SEQ ID NO: 594 - protein, 50 aa, Homo sapiens
VPKAALLLRARRAPKSSLKFSPGPCPGPGPSPGPGPGPSPGPGPGPSPCP

SEQ ID NO: 595 - protein, 50 aa, Homo sapiens
SNLETPRSESPDLILHDSGVSAARAAAAAAAAAAASAGGKEAASGPNDSG

SEQ ID NO: 596 - protein, 50 aa, Homo sapiens
MKAAAAAPASEDEDDEDDEDDEDDDEEDDSEEEAMETTPAKGKKAAKVVP

SEQ ID NO: 597 - protein, 50 aa, Homo sapiens
HLQALQQHVPAQGVSHLHSNHLYIKQQQQQQQQQQQQQQAGQLRERHHLY

SEQ ID NO: 598 - protein, 50 aa, Homo sapiens
HLQALQQHVPAQGVSHLHSNHLYIKAAQQQQQQQQQQQQQQQQQAGQLRE

SEQ ID NO: 599 - protein, 50 aa, Homo sapiens
EGCAPGSKKDSSLCKLCMGSGLNLCKEGYYGYTGAFRCLVEKGDVAFVKH

SEQ ID NO: 600 - protein, 50 aa, Homo sapiens
FESLKSFQQQQQQQQQQQQQQQQQQQPPPPPPPPPPPQLPQPPPQAQPLL

SEQ ID NO: 601 - protein, 50 aa, Homo sapiens
FQQQQQQQQQQQQQQQQQQQQQPPRRRPPPPPPPPPQLPQPPPQAQPLLP

SEQ ID NO: 602 - protein, 50 aa, Homo sapiens
PAVEKLLSGKRLSSGFGGGGGGGSGAAGGGGGSGGGGGGLGSSSHPLSSL

SEQ ID NO: 603 - protein, 50 aa, Homo sapiens
AEKLKRLDEKFGAPDKRLKAEPAAPSTPAPPPAVPKELPAPPAPPPASAP

SEQ ID NO: 604 - protein, 50 aa, Homo sapiens
ARFEEGDPEEEECEVDQGDGEEEEGKEERGRGVSLLGRPKRKRVITYAQR

SEQ ID NO: 605 - protein, 50 aa, Homo sapiens
LEAAAATQAGLTPDRLHPNSLKPLSIQFILQQVLFIIIIIIIIHNRHFPG

SEQ ID NO: 606 - protein, 50 aa, Homo sapiens
FAKEEGFESKDGNSTAEETDIPPQVTAKSLQQSSRNRISSGPGNLDMWAS

SEQ ID NO: 607 - protein, 50 aa, Homo sapiens
FAKEEGFESKDGNSTAEETDIPPPVPAKSLQQSSRNRISSGPGNLDMWAS

SEQ ID NO: 608 - protein, 50 aa, Homo sapiens
FAKEEGFESKDGNSTAEETDIPPPVTAKSLQQSSRNRISSGPGNLDMWAS

SEQ ID NO: 609 - protein, 50 aa, Homo sapiens
EEASGPVSQSQKSKSRGRAGPDAVTHDNEWEMLSPQPVQKNMIPDTEMEE

SEQ ID NO: 610 - protein, 50 aa, Homo sapiens
GFESKDGNSTAEETDIPPQSLQQSLQQSSRNRISSGPGNLDMWASPHTDN

SEQ ID NO: 611 - protein, 50 aa, Homo sapiens
PSTSTSISAGTTSTSTTPASTTPASTTPASTTPASTSTASSQASQEGSSP

SEQ ID NO: 612 - protein, 50 aa, Homo sapiens
SPSTSTSISAGTTSTSTTPASTTLPPPHPASTTPASTSTASSQASQEGSS

SEQ ID NO: 613 - protein, 50 aa, Homo sapiens
SSSNSVSSEEEEEEGEEEEEEEEEEEEGGSGASDSSEVSSEEEDSSTESD

SEQ ID NO: 614 - protein, 50 aa, Homo sapiens
SSEHDEGLSFSGKVQCYGRELNQPAKCTGDFSPSPEKLVKSGNPLQPVSI

SEQ ID NO: 615 - protein, 50 aa, Homo sapiens
VTKEEPKCQKPRSLAAIEEAALLRPYCRSPLFSILNGLHLHNLRGLLCAL

SEQ ID NO: 616 - protein, 50 aa, Homo sapiens
PEPDTEPDSTAAVPSQPAPSAATTTAVTAAAASDDSPSEGKDEQEAVQEV

SEQ ID NO: 617 - protein, 50 aa, Homo sapiens
EPDTEPDSTAAVPSQPAPSAATTTTVTAAAASDDSPSEGKDEQEAVQEVP

SEQ ID NO: 618 - protein, 50 aa, Homo sapiens
KAPAIGFSPSVLPKPQNTNKECSWGTIGKHHGADDSRFSILAPSFTSLDK

SEQ ID NO: 619 - protein, 50 aa, Homo sapiens
RGKVEEWEEEVADGEEEEEEEEEEEDKFKESEVLESVLGDNQDKETGVKK

SEQ ID NO: 620 - protein, 50 aa, Homo sapiens
KVEEWEEEVADGEEEEEEEEEEEEEKFKESEVLESVLGDNQDKETGVKKL

SEQ ID NO: 621 - protein, 50 aa, Homo sapiens
VPQVSQATGVQLPGKTITPAHFQLLSRQQQQQQQQQQQQQQQQQQQQQQQ

SEQ ID NO: 622 - protein, 50 aa, Homo sapiens
STTTVEHAPIWRPGTEQSSGSSGEQRRGGGSSSRPASHSHAHQHSPISPR

SEQ ID NO: 623 - protein, 50 aa, Homo sapiens
STTTVEHAPIWRPGTEQSSGSSGGERGGSSSRPASHSHAHQHSPISPRTQ

SEQ ID NO: 624 - protein, 50 aa, Homo sapiens
KSILTSTTTVEHAPIWRPGTEQSRRQPGSSGGGGGSSSRPASHSHAHQHS

SEQ ID NO: 625 - protein, 50 aa, Homo sapiens
LCVIIAKSCDASLAELGDDKSGRGQAGRGQAGDASRLTSAFPDSLYECLP

SEQ ID NO: 626 - protein, 50 aa, Homo sapiens
SRGQNMDDVMVLVDSEEEEEEEEEEDAAVGEQEGAREREELPKEIPKQDH

SEQ ID NO: 627 - protein, 50 aa, Homo sapiens
TSSTHFYHPIHSNGTPIHTPTPTPTPTPTPTPTPTSEMIAGSQSLSRESP

SEQ ID NO: 628 - protein, 50 aa, Homo sapiens
TCVVLTFLGHRLLKRLLGPKLRRFLFKPQGHPRLLLWFKRGLALAAFLGL

SEQ ID NO: 629 - protein, 50 aa, Homo sapiens
RCNPGPRRSQSQSWKLRPLKRLNRSQSQSWNPRLKQNQSRNWSQNRTQSP

SEQ ID NO: 630 - protein, 50 aa, Homo sapiens
LAQATAVAAPCPPVTPAPPAPPAPQPPPPSPPPPPAVQHTGLLSTPTLPA

SEQ ID NO: 631 - protein, 50 aa, Homo sapiens
AQATAVAAPCPPVTPAPPAPPAPPPLPPSPPPPPAVQHTGLLSTPTLPAA

SEQ ID NO: 632 - protein, 50 aa, Homo sapiens
AQATAVAAPCPPVTPAPPAPPAPPPPPPSPPPPPAVQHTGLLSTPTLPAA

SEQ ID NO: 633 - protein, 50 aa, Homo sapiens
VNVRVSSLTLLGAIVSTHAPLPEVQQPCSSGLGNSNSATPHLSPPDWWKK

SEQ ID NO: 634 - protein, 50 aa, Homo sapiens
KPQCCQSVCCRPYCCESSCCRPWLLPPHCCQTTCCRTTCCRTTCCCPSCC

SEQ ID NO: 635 - protein, 50 aa, Homo sapiens
SRGSRLPLALPPASQGCSSGGGGGGGGGSSAGGSGNSRPPRNLQGLLQMA

SEQ ID NO: 636 - protein, 50 aa, Homo sapiens
LESKTYETKKIFSENDIFEINFSQWKDKSKTLGLEASIFRNNWKCKSIFE

SEQ ID NO: 637 - protein, 50 aa, Homo sapiens
GLQEKLRYLQQQLQDETPRRQEAELQEPEEKQEPEEKQKPEAGLSWNSLG

SEQ ID NO: 638 - protein, 50 aa, Homo sapiens
GMQQQMPTLPPPSVSATGPGPGPGPGPGPGPAPPNYSRPHGMGGPNMPPP

SEQ ID NO: 639 - protein, 50 aa, Homo sapiens
SLLSVPKILRISSGENSACNKTKQNKEFQEIGCSEKELKSKKLESTGDPK

SEQ ID NO: 640 - protein, 50 aa, Homo sapiens
VQTSPVPTPDPKRLIQLPSATQSNVNTLSSVSCMPTMPPIPARSQSQENM

SEQ ID NO: 641 - protein, 50 aa, Homo sapiens
GERGEPGGGGFFGSSLPGPPGPPGPRGYPGIPGPKGESIRGQPGPPGPQG

SEQ ID NO: 642 - protein, 50 aa, Homo sapiens
NPPAPTANPTGPAANPPATTANPPAPAATPTGPAANPPAPAASSTPHGHC

SEQ ID NO: 643 - protein, 50 aa, Homo sapiens
EAKSPEKAKSPVKEEAKSPEKAKSPEKAKSPVKAEAKSPEKAKSPVKAEA

SEQ ID NO: 644 - protein, 50 aa, Homo sapiens
ELPSRSYPLRGSHSLDDLLDRPGNSTPSRVPSRAPSPAPPPLPSSRRSSM

SEQ ID NO: 645 - protein, 50 aa, Homo sapiens
ALEEGPVNPMTPVTPMTSMTSMSPHDTMTPMNPGNELPSRSYPLRGSHSL

SEQ ID NO: 646 - protein, 50 aa, Homo sapiens
LLLLQQQQQQQQQQQQQQQQQQQQQETSPRQQQQQQGEDGSPQAHRRGPT

SEQ ID NO: 647 - protein, 50 aa, Homo sapiens
LLQQQQQQQQQQQQQQQQQQQQQQQQQETSPRQQQQQQGEDGSPQAHRRG

SEQ ID NO: 648 - protein, 50 aa, Homo sapiens
LPNSGQGQKEGVCGASPEDEAEEEEEEEEEEEECEPQAVPVSPASACSPP

SEQ ID NO: 649 - protein, 50 aa, Homo sapiens
NGRMGTEKQSPSGETRKKSLSRDKGWRRRSALSREILTKERHQECSDCGK

SEQ ID NO: 650 - protein, 50 aa, Homo sapiens
CIASGVLVSYPSVGGATRPSAWRRHPPLRACQQQRAGHSDVRLSAHHHRM

SEQ ID NO: 651 - protein, 50 aa, Homo sapiens
LVPGTHAQGASDTHPLGPPHTPVLETPSPQDGFPVLWRGSSKASHMNRLR

SEQ ID NO: 652 - protein, 50 aa, Homo sapiens
APREEQQRSLEAPGWEDAERRERGSGGSGEERERLEAEEERRRLQAQAQA

SEQ ID NO: 653 - protein, 50 aa, Homo sapiens
PLEAERAPREEQQRSLEAPGWEDGSGGSGAERREREERERLEAEEERRRL

SEQ ID NO: 654 - protein, 50 aa, Homo sapiens
HNSEDEDEDKYADDIDMPGQNFDSKNLRIREDIAKYLRNLDPNSAYYDPK

SEQ ID NO: 655 - protein, 50 aa, Homo sapiens
PIVTTVPTVTTVRTSTTVPTTTTVPTTTVPTTMSIPTTTTVLTTMTVSTT

SEQ ID NO: 656 - protein, 50 aa, Homo sapiens
TTTTTPLPTTTTPRPTTATTRRTTTRRPTTTVRTTTRTTTTTTPTPTTPI

SEQ ID NO: 657 - protein, 50 aa, Homo sapiens
FNDCFVKVARSPDKPGKGSYWTLHPENGCYLRRQKRFKCEKQPGAGGGGG

SEQ ID NO: 658 - protein, 50 aa, Homo sapiens
VKVARSPDKPGKGSYWTLHPDSGNMYGCYLRRQKRFKCEKQPGAGGGGGS

SEQ ID NO: 659 - protein, 50 aa, Homo sapiens
TNLTSEELRKRREAYFEKHQQPAAAAAAEQQQQQQQGDLSGQSSHPCERP

SEQ ID NO: 660 - protein, 50 aa, Homo sapiens
GTNLTSEELRKRREAYFEKHQQPAAAAAEQQQQQQQGDLSGQSSHPCERP

SEQ ID NO: 661 - protein, 50 aa, Homo sapiens
LRKRREAYFEKHQQQQQQQQQQGAAAAADLSGQSSHPCERPATSSGALGS

SEQ ID NO: 662 - protein, 50 aa, Homo sapiens
LRKRREAYFEKHQQQQQQQQQQGAAAAAADLSGQSSHPCERPATSSGALG

SEQ ID NO: 663 - protein, 50 aa, Homo sapiens
RKRREAYFEKHQQQQQQQQQQGAAAAAAADLSGQSSHPCERPATSSGALG

SEQ ID NO: 664 - protein, 50 aa, Homo sapiens
LTSEELRKRREAYFEKQQQKQQPAAAAAEQQQQQQQGDLSGQSSHPCERP

SEQ ID NO: 665 - protein, 50 aa, Homo sapiens
RREAYFEKQQQKQQQQQQQQQQGAAAAADLSGQSSHPCERPATSSGALGS

SEQ ID NO: 666 - protein, 50 aa, Homo sapiens
RREAYFEKQQQKQQQQQQQQQQGAAAAAADLSGQSSHPCERPATSSGALG

SEQ ID NO: 667 - protein, 50 aa, Homo sapiens
REAYFEKQQQKQQQQQQQQQQGAAAAAAADLSGQSSHPCERPATSSGALG

SEQ ID NO: 668 - protein, 50 aa, Homo sapiens
NYDFSSAESGSSLRYYSEGESGGGGGGSSLSLHPPQQPPLVPTNSGGGGA

SEQ ID NO: 669 - protein, 50 aa, Homo sapiens
LSDENYDFSSAESGSSLRYYSEGEKRRGGGGSSLSLHPPQQPPLVPTNSG

SEQ ID NO: 670 - protein, 50 aa, Homo sapiens
NYDFSSAESGSSLRYYSEGESGGGGGGSSLSLHPPQQPPLVPTNSGGGLY

SEQ ID NO: 671 - protein, 50 aa, Homo sapiens
EQEKMQEQEEKIWEQEEKIRDQEEIEWGQEKKMWRQEKMREQEDVETGGE

SEQ ID NO: 672 - protein, 50 aa, Homo sapiens
EPQANGEAVGAGGGPIYYIYEEEEEEEEEEPPPEPPKLVNDKPHKFKDHF

SEQ ID NO: 673 - protein, 50 aa, Homo sapiens
LDEADSENKEEVSPLGSKAPIWIPDKFTLTWRRHHCRACGKIVCQACSSN

SEQ ID NO: 674 - protein, 50 aa, Homo sapiens
WKLCHAQSRLDVNGLALKMAKERKVKNKADTEEVFNNSPTNQEKMPTSAI

SEQ ID NO: 675 - protein, 50 aa, Homo sapiens
DTLTQMMTSTLFSSPSVHNVMETCYAGDAPPDEMTTSFPSSVTNTLMMTS

SEQ ID NO: 676 - protein, 50 aa, Homo sapiens
LFLLPAFPQLPQVTPPLFLSPTLPQLPQMTPPVFLSPTFPRHPQDMPPLF

SEQ ID NO: 677 - protein, 50 aa, Homo sapiens
PALPQHPQVTPPLFLSPALPQHPQVTPPLFMSPALPQHPEVTPALFLSPM

SEQ ID NO: 678 - protein, 50 aa, Homo sapiens
LFLSPTLPHHPQVTPPLFLSPRLPQHPQVTPPLFMSPALPQHPQVTPPLC

SEQ ID NO: 679 - protein, 50 aa, Homo sapiens
SVSQETEPEREAGLQNTHTHTHTHTHTQHTHTDHQHILSLFRSIKSRRQG

SEQ ID NO: 680 - protein, 50 aa, Homo sapiens
QSFLLDTQYRRSCAVEYPHQARPGRGSAGPQLHGSTKSQSGGRRTRQGPG

SEQ ID NO: 681 - protein, 50 aa, Homo sapiens
PSQHSSAPQKSLPDLPPPKMRILTLGGQISGAQSFSPDGTHLTGTEFLGG

SEQ ID NO: 682 - protein, 50 aa, Homo sapiens
ELEQQIEKLQAEVKGYKDENNRLKEKEKEHKNQDDLLKEKETLIQQLKEE

SEQ ID NO: 683 - protein, 50 aa, Homo sapiens
EELEQQIEKLQAEVKGYKDENNRLKKKEKEHKNQDDLLKEKETLIQQLKE

SEQ ID NO: 684 - protein, 50 aa, Homo sapiens
EQLATTTCHALPPAALLCGMREVRRWGAGGCCHALPATGILAFPKLVASV

SEQ ID NO: 685 - protein, 50 aa, Homo sapiens
LPEPRASSSKESPSPSVREQLALLEKLQYQRAALQAKRSQDLEQAKAYLR

SEQ ID NO: 686 - protein, 50 aa, Homo sapiens
VGYQSVTPGEKTLTPVGHQSVTHWTEDPDPVSHQSVSPGGTTMTPVHFQT

SEQ ID NO: 687 - protein, 50 aa, Homo sapiens
TLTSVGYQSVTPGEKTLTPVGHQSVSPGGTTMTPVHFQTETLRQNTVAPR

SEQ ID NO: 688 - protein, 50 aa, Homo sapiens
GAFGTVYKGLWIPEGEKVKIPVAIKTSPKANKEILDEAYVMASVDNPHVC

SEQ ID NO: 689 - protein, 50 aa, Homo sapiens
VAIKELREATSPKANKEILDEAYVWPAMASVDNPHVCRLLGICLTSTVQL

SEQ ID NO: 690 - protein, 50 aa, Homo sapiens
PVPPTGDSGAPPVTPTGDSETAPVPPTGDSEAAPVPPTDDSKEAQMPAVI

SEQ ID NO: 691 - protein, 50 aa, Homo sapiens
IKQELGEESTRLAKEKEQSPTAEKDASLANSSTTTLEDKGPGHATFGREA

SEQ ID NO: 692 - protein, 50 aa, Homo sapiens
EGYMALQSKGYPLPHPKSSDTLAMDSVRNESSFSASLGRAGGVSAQRDLF

SEQ ID NO: 693 - protein, 50 aa, Homo sapiens
GIIHRDLCLENLLLVHCTLQAGPGPRPAPAPAPAPAAAAPPCSSAAPPAG

SEQ ID NO: 694 - protein, 50 aa, Homo sapiens
EPRSPGGWRSGRRRLNSSSGSGSGSSVSSPSWAGRLRGDRQQVVAAGTLS

SEQ ID NO: 695 - protein, 50 aa, Homo sapiens
ERLERERLERERLERERLEQEQLERAERQERERQERLERQERLERQERLE

SEQ ID NO: 696 - protein, 50 aa, Homo sapiens
ERERQERERQERLERQERLERQERLDRERQERQERERLERLERERQERER

SEQ ID NO: 697 - protein, 50 aa, Homo sapiens
PGAGIPPPPPLPGAGILPLPPLPGAAIPPPPPLPGAGIPLPPPLPGAGIP

SEQ ID NO: 698 - protein, 50 aa, Homo sapiens
IIQQLEKSDAEYTNSPLVPTFCTPGLKIPSTKNSIALVSTNYPLSKTNSG

SEQ ID NO: 699 - protein, 50 aa, Homo sapiens
PDSPLCSVTCPVSSRHRRATGATEAEKMTVSLPGPILLLSDDSSFRGVGG

SEQ ID NO: 700 - protein, 50 aa, Homo sapiens
LRALPGTNEPYESSSNKEIDASYVDPLGPQIERPKTAAKKRIDEDDFADG

SEQ ID NO: 701 - protein, 50 aa, Homo sapiens
QVTGDPHFNIVITDYSSEDMDVEMALKRSKLRSYQYVKLSGNFERSAGLG

SEQ ID NO: 702 - protein, 50 aa, Homo sapiens
GQTGLRGPQPLKMGMMNNPNPYGSPYTQNPGQQIGASGLGLQIQTKTVLG

SEQ ID NO: 703 - protein, 50 aa, Homo sapiens
LRNKDPQEILLNEAFVVPYGTPLSVNFGPTVDGDFLTDMPDILLELGQFG

SEQ ID NO: 704 - protein, 50 aa, Homo sapiens
KVILRRYEKRGHGNLQLIKRCESVDECKVHTGGYNGLNQCSTTTQSKVFG

SEQ ID NO: 705 - protein, 50 aa, Homo sapiens
EDWLLWQVPEFSTVALNVVFEKIPENESADVCRNISVNVLDCDTIGQAKG

SEQ ID NO: 706 - protein, 50 aa, Homo sapiens
TEGLQYSLHGLAAGAPPQDSSSKSPEPSADESPDNDKETPGGGGDAGKKG

SEQ ID NO: 707 - protein, 50 aa, Homo sapiens
QDWQPRTEEFSTSHMKYSGRSIKFLLPPLSLLPTRSGVLTIPQNHKFPKG

SEQ ID NO: 708 - protein, 50 aa, Homo sapiens
FSLSCNNFNAVFSRISTRLQELTVCSEDNVDVHDIELLQYINVDCAKLKG

SEQ ID NO: 709 - protein, 50 aa, Homo sapiens
GGGGGGGGGGGGGGGGGGGGGGGGGGGGGGGGGGMTGELEVKNMDMKPGG

SEQ ID NO: 710 - protein, 50 aa, Homo sapiens
VTVRVLGSSKRPFQNKYFRNMELKLQLASAIVTLTPMEQQDEYSENYILG

SEQ ID NO: 711 - protein, 50 aa, Homo sapiens
ARLSDTANYTCVAKNIVAKRKSTTATVIVYVNGGWSTWTEWSVCNSRCGG

SEQ ID NO: 712 - protein, 50 aa, Homo sapiens
GGGGGGGGGGGGGGGGGGGGGGGGGMDSRRDWEREKRILEGKLQLPKALA

SEQ ID NO: 713 - protein, 50 aa, Homo sapiens
HEWLERRNRRGPVVVKPIPVKGDGSEMNHLAAESPGEVQASAASPASKGG

SEQ ID NO: 714 - protein, 50 aa, Homo sapiens
VVRFCLQGLLENSPHLICIGALKKLCNHPCLLFNSIKEKECSSTCDKNEG

SEQ ID NO: 715 - protein, 50 aa, Homo sapiens
KLTVQEEQIVELIEKIGAVEEELNRVTELFMDNKNELDQCKSDLQNKTQG

SEQ ID NO: 716 - protein, 50 aa, Homo sapiens
GNKCTMCKEKLEREAAEKKKKEDEDRSNTGERSNTGERSNDKEDLCREFG

SEQ ID NO: 717 - protein, 50 aa, Homo sapiens
EIYHNRFDAVQSAHRAATRGFIRYGWRWGWRTAVFVTIFNTVNTSLNVYG

SEQ ID NO: 718 - protein, 50 aa, Homo sapiens
VIRRHHGGATDGPGETDVIYSLIIRRKPLFYVINIIVPCVLISGLVLLAG

SEQ ID NO: 719 - protein, 50 aa, Homo sapiens
GGGGGMTERRRDELSEEINNLREKVMKQSEENNNLQSQVQKLTEENTTLG

SEQ ID NO: 720 - protein, 50 aa, Homo sapiens
LACDIRVAASSAKMGLVETKLAIIPGGGGTQRLPRAIGMSLAKELIFSAG

SEQ ID NO: 721 - protein, 50 aa, Homo sapiens
DSSGNLASVTYKRGRVLKEPVNLEGDDTSLIHGKIPSEMPSPNFGKNIYG

SEQ ID NO: 722 - protein, 50 aa, Homo sapiens
YELMPSFDFLAEKLQFYQRQFNEIIRGTSLDLVFFKDAMTHLIKISRIIG

SEQ ID NO: 723 - protein, 50 aa, Homo sapiens
QAVSAHRHRARVLLISKLSCVGIWILATVLSIPELLYSDLQRSSSEQAMG

SEQ ID NO: 724 - protein, 50 aa, Homo sapiens
GGGGGGGGGGGGGGGGGGGGGGGGGGGGGGGGGGGGGMLIVNLLAVTGGG

SEQ ID NO: 725 - protein, 50 aa, Homo sapiens
DSIASNCRSSPSHTTNGCQGEKVRTCEKSDESAMSFYPPSLNDASFTLIG

SEQ ID NO: 726 - protein, 50 aa, Homo sapiens
KRKMEPDTEKMDRTPEKDKISLSAPAKKIKLNRETGKKIGSTENISNTKG

SEQ ID NO: 727 - protein, 50 aa, Homo sapiens
LQEPKKDLIARVVRIIGNKKAIELLMETAEVEQNGGLFIMNGSRRRTPGG

SEQ ID NO: 728 - protein, 50 aa, Homo sapiens
DGGFLNDASTENQNTDSESSSEDVELESMGEGLFGYPLVGEETEREEEEG

SEQ ID NO: 729 - protein, 50 aa, Homo sapiens
KDKWDKAALGYDYKGETEKHESQRDYAKGFGGQYGIQKDRVDKSAVGFNG

SEQ ID NO: 730 - protein, 50 aa, Homo sapiens
DAQPKKESYKVGDVLKFSCRKNLIRVGSDSVQCYQFGWSPNFPTCKGQVG

SEQ ID NO: 731 - protein, 50 aa, Homo sapiens
NSTTSTFCGTPEYLAPEVLHKQPYDRTVDWWCLGAVLYEMLYGLPPFYSG

SEQ ID NO: 732 - protein, 50 aa, Homo sapiens
STGDGPVPVPPEVEQAMKQWEYNEKLAFHMFQEGMLEKHEYLTWILDVLG

SEQ ID NO: 733 - protein, 50 aa, Homo sapiens
HCLEKTTNHEFVDEQVFEESCMEVATVNRPSSHSPSLSSQQGVTSTCCSG

SEQ ID NO: 734 - protein, 50 aa, Homo sapiens
EHAPHGHFVTCVKAYDADSSDIDKLQYSILSGNDHKHFVIDSATGIITLG

SEQ ID NO: 735 - protein, 50 aa, Homo sapiens
EDQPHRRCTLQSVLEACRVHEKEVSVYPAPAGLHIRRLVGLVLGTISEVG

SEQ ID NO: 736 - protein, 50 aa, Homo sapiens
NLHLTGDIHAITAANNLLAAAIDTRILHENTQTDKALYNRLVPLVNGVRG

SEQ ID NO: 737 - protein, 50 aa, Homo sapiens
QDLIRLVAYTQDGVMHPRTTFLMVDEEQTVPFALRDENLKGVVYTTRPLG

SEQ ID NO: 738 - protein, 50 aa, Homo sapiens
NPSEDDYEEEEEDSDEDYSSEAEESDYSKESLGSEEESGKDWDELEEEAG

SEQ ID NO: 739 - protein, 50 aa, Homo sapiens
GGGGGGGGGGGGGGGGGGGGGGGGGGGGGGGGMGPLEFRDVAIEFSLEEG

SEQ ID NO: 740 - protein, 50 aa, Homo sapiens
GGGGGGGGGGGGMSLISWLRWNEAPSRLSTRSPAEMVLETLMMELTGQMG

SEQ ID NO: 741 - protein, 50 aa, Homo sapiens
KQEAIDEVKRQWREEVASLQAVMKETVRDYEHQFHLRLEQERTQWAQYRG

SEQ ID NO: 742 - protein, 50 aa, Homo sapiens
HILHANDPKWSTPTKDCTSGPYTAQIIPGTGNKLLMSSPNCEIYYQSPLG

SEQ ID NO: 743 - protein, 50 aa, Homo sapiens
LQWHPLLAKKLLDFSEEEEEEDEEEDIDKVQLLGADGLEQDVGETEDDEG

SEQ ID NO: 744 - protein, 50 aa, Homo sapiens
STQLAKLTFRKFDAPFTLTWFATNWNFLFFPLYYVGHVCKSTEKQSVKQG

SEQ ID NO: 745 - protein, 50 aa, Homo sapiens
RSRTNFTLEQLNELERLFDETHYPDAFMREELSQRLGLSEARVQVWFQNG

SEQ ID NO: 746 - protein, 50 aa, Homo sapiens
EFVLKLVSLRHYYFTIGWNIFDFVVVILSIVGMFLAEMIEKYFVSPTLFG

SEQ ID NO: 747 - protein, 50 aa, Homo sapiens
CLTIGQHHGHPIDDLQSAYLKEKDTPQKLLEQLTDTHWTDLTHLIEKLKG

SEQ ID NO: 748 - protein, 50 aa, Homo sapiens
MQAQCVKTETEFYRRSRSEIVDQQGHTMGALYWQLNDIWQAPSWASLEYG

SEQ ID NO: 749 - protein, 50 aa, Homo sapiens
GGGGGGGGGGMNPPAAFLAGRQNIGSEVEISTIEKQRKELQLLIGELKDG

SEQ ID NO: 750 - protein, 50 aa, Homo sapiens
LLFHKMMFETIPMFSGGTCNPQFVVCQLKVKIYSSNSGPTRREDKFMYFG

SEQ ID NO: 751 - protein, 50 aa, Homo sapiens
CQQSSCQPACCTSSPCQQSYCVPVCCKPVCCKPICCVPVCSGASSLCCQG

SEQ ID NO: 752 - protein, 50 aa, Homo sapiens
MRNTVYAVKRLKENADLEWTAVKQSFLTEVEQLSRFRHPNIVDFAGYCAG

SEQ ID NO: 753 - protein, 50 aa, Homo sapiens
LLQQARGRVINITSVLGRLAANGGGYCVSKFGLEAFSDSLRRDVAHFGIG

SEQ ID NO: 754 - protein, 50 aa, Homo sapiens
PQPWGHMLLWTAVLFLAAPPKAVLKLEPQWINVLQEDSVTLTCRGTHSPG

SEQ ID NO: 755 - protein, 50 aa, Homo sapiens
GANILKIKAYDADSGFNGKVLFTISDGNTDSCFNIDMETGQLKVLMPMDG

SEQ ID NO: 756 - protein, 50 aa, Homo sapiens
GRAVGQWAGAKLLDHGCVESSILDSSAGSAPHYEVFVALRGLRNLSEENG

SEQ ID NO: 757 - protein, 50 aa, Homo sapiens
EVRTLANRMNTGLEKLKEASESVAALSKELEAKEKELQVANDKADMVLKG

SEQ ID NO: 758 - protein, 50 aa, Homo sapiens
NTASYSGAYYAPGYTQTSYSTEVPSTYRSSGNSPTPVSRWIYPQQDCQTG

SEQ ID NO: 759 - protein, 50 aa, Homo sapiens
WEIWLMNEEEAKDLIARAFDVDRIIHTHHLGLPWAAPDFWFLNNVGPISG

SEQ ID NO: 760 - protein, 50 aa, Homo sapiens
STWLLWLCYLKSALNPLIYYWRIKKFHDACLDMMPKSFKFLPQLPGHTKG

SEQ ID NO: 761 - protein, 50 aa, Homo sapiens
HSQLLQLSRASMAAWKSWTALRLCATVVVLDMVVCKGFVEDLDESFKENG

SEQ ID NO: 762 - protein, 50 aa, Homo sapiens
GGGGGGGGGGGGGGGGGGGGGGGGGGGGGGGGGGGGGGGGGGGMKHIING

SEQ ID NO: 763 - protein, 50 aa, Homo sapiens
DDVRGRMFPFDKLIIPEFVCALDASDEFLKERVINLPESIVAGTHYSQDG

SEQ ID NO: 764 - protein, 50 aa, Homo sapiens
KAKENDENCGPTTTVFVGNISEKASDMLIRQLLAKCGLVLSWKRVQGASG

SEQ ID NO: 765 - protein, 50 aa, Homo sapiens
ERWRRKVICKEEPVSEVKETSTTVEEATTIVKPQEIMLDNIEDPSQEDLG

SEQ ID NO: 766 - protein, 50 aa, Homo sapiens
YTFSEPFHLIVSYDWLILQGPAKPVFEGDLLVLRCQAWQDWPLTQVTFYG

SEQ ID NO: 767 - protein, 50 aa, Homo sapiens
KRTAEVWMDEYKQYYYAARPFALERPFGNVESRLDLRKNLRCQSFKWYLG

SEQ ID NO: 768 - protein, 50 aa, Homo sapiens
YRRPYGCAVLSILDVLQSLTEVKEEKDFVLKVYTCNNESEWSQIHENIIG

SEQ ID NO: 769 - protein, 50 aa, Homo sapiens
LKREINNSHIQEVVQVIKQMTENLERHQEKLEEKQAACLEQIREMEKQFG

SEQ ID NO: 770 - protein, 50 aa, Homo sapiens
ALDIDECASNPCAAGGTCVDQVDGFECICPEQWVGATCQLDANECEGKPG

SEQ ID NO: 771 - protein, 50 aa, Homo sapiens
PHTTCWPGRTLYLLAPSFPDKQRWVTALESVVAGGRVSREKAEADAKLLG

SEQ ID NO: 772 - protein, 50 aa, Homo sapiens
NKGTNIYCEASQGNVSEGMKGIVLFVSKVLEEPKDFSCETEDFKTLHCTG

SEQ ID NO: 773 - protein, 50 aa, Homo sapiens
NLIQQAKFYESIMKILRPKPDYFAVGYYGQGFPSFLRNKVFIYRGKEYEG

SEQ ID NO: 774 - protein, 50 aa, Homo sapiens
IIHTGEKPYRCEECGKAFNRSSHLTTHKRIHTGVKPYKCTECGKAFNRSG

SEQ ID NO: 775 - protein, 50 aa, Homo sapiens
IWPAAFVPGMAAFATAHLLYVWAFGFSPLQPGLLLLIILAPGPYLSLVLG

SEQ ID NO: 776 - protein, 50 aa, Homo sapiens
TPNGDVSHEPVAGAITVVSQEAAQVLESAGEGPLDVRLRKLAGEKEELLG

SEQ ID NO: 777 - protein, 50 aa, Homo sapiens
QDLEAWQKELYKHVMRSNYETLVSLDDGLPKPELISWIEHGGEPFRKWRG

SEQ ID NO: 778 - protein, 50 aa, Homo sapiens
FEVKESKFRREMEKLRNQQSRDLSLEVKVDRDRDLLIQQTMRQLNNHFGG

SEQ ID NO: 779 - protein, 50 aa, Homo sapiens
VRAAGLRALRYLIQDSSILQKVLKLKVDYLIARCIDIQQSNEVERTQALG

SEQ ID NO: 780 - protein, 50 aa, Homo sapiens
PGDVKTTDPKSEVLEEMLHNLDFCDILVIGGDLDPRQECLELNHSELHQG

SEQ ID NO: 781 - protein, 50 aa, Homo sapiens
AEERRKYTLKIVEEETKKELEENKRSLAALDALNTDDENDEEEYEAWKVG

SEQ ID NO: 782 - protein, 50 aa, Homo sapiens
MPEPGPAYDLTFCEVRDTSLVMLWKAPVYSGSSPVSGYFVDFREEDAGEG

SEQ ID NO: 783 - protein, 50 aa, Homo sapiens
KFICNDDFKHKLFRIKINQIQMKETVEEQASTTERVFQDRQYQIDAAIVG

SEQ ID NO: 784 - protein, 50 aa, Homo sapiens
GAAVEVNLNTMTSVDLLSALRTVINEPSYKENAMRLSRIHHDQPVKPLDG

SEQ ID NO: 785 - protein, 50 aa, Homo sapiens
FICCIVMIVFPVAIIIASYARVILAVIHMGSGEGRRKAFTTCSSHLMVVG

SEQ ID NO: 786 - protein, 50 aa, Homo sapiens
LMDNLFKYVIGTLELLVAENYMIVYLNGATTRRKMPSLGWLRKCYQQIDG

SEQ ID NO: 787 - protein, 50 aa, Homo sapiens
RQRSGWSSGRSGRSGRSGGRSGGRSGRQSRQGSRSGSRQDGRRRSGNRNG

SEQ ID NO: 788 - protein, 50 aa, Homo sapiens
HLAVQSLIRAYQVRGHHIAKLDPLGISCVNFDDAPVTVSSNVDLAVFKEG

SEQ ID NO: 789 - protein, 50 aa, Homo sapiens
CSRLNIPFPFIVFAYFYMVVKKCFKCCCKEKNMESSVCCFKNEDNETLAG

SEQ ID NO: 790 - protein, 50 aa, Homo sapiens
LLQVSSWLCQEPEPCHPGFDAESYTFTVPRRHLERGRVLGRVNFEDCTGG

SEQ ID NO: 791 - protein, 50 aa, Homo sapiens
GGGGGGGGGGGGGGGGGGMKLSMKNNIINTQQSFVTMPNVIVPDIEKEIG

SEQ ID NO: 792 - protein, 50 aa, Homo sapiens
GGGGGGGGGGGGGGGGGGGGGGGGGGGMELGPEPPHRRRLLFACSPPPAG

SEQ ID NO: 793 - protein, 50 aa, Homo sapiens
QALFYRYCYLNWDHYDNIYITSRFLRMEAVRSTAGLPTVLPLSAHEARRG

SEQ ID NO: 794 - protein, 50 aa, Homo sapiens
HQRAHTGEKPYECKECEKAFTCSTELVRHQKVHTGERPHKCKECGKAFIG

SEQ ID NO: 795 - protein, 50 aa, Homo sapiens
GGGGGGGGGGGGGGGGGGGGGGGGGGGGGGGGGGGGGMTEALQWARYHWG

SEQ ID NO: 796 - protein, 50 aa, Homo sapiens
DTEIQREIGISNPLHRLKLRLAIQEMVSLTSPSAPASSRTSTGNVWMTHG

SEQ ID NO: 797 - protein, 50 aa, Homo sapiens
ESEQELHEGAKTLECTMRGVLREQYLQKYISPQHWESLMNGPVQDSEWIG

SEQ ID NO: 798 - protein, 50 aa, Homo sapiens
GGGGGGGGGGGGGMTGKSVKDVDRYQAVLANLLLEEDNKFCADCQSKGPG

SEQ ID NO: 799 - protein, 50 aa, Homo sapiens
DIHLQPLKTQLKSWKPCLSPKSDCENSETATKEGISEEKSQGLPQEPSFG

SEQ ID NO: 800 - protein, 50 aa, Homo sapiens
GGGGGGGGGGMMEPEEYRERGREMVDYICQYLSTVRERRVTPDVQPGYLG

SEQ ID NO: 801 - protein, 50 aa, Homo sapiens
CASCVANIERNLRREEGIYSILVALMAGKAEVRYNPAVIQPPMIAEFIRG

SEQ ID NO: 802 - protein, 50 aa, Homo sapiens
EAGIAWDKGEKRNLEVLRSFQNQIAAIQRDAVWWLHTVVPSISKLAPKDG

SEQ ID NO: 803 - protein, 50 aa, Homo sapiens
MHPGLWLLLVTLCLTEELAAAGEKSYGKPCGGQDCSGSCQCFPEKGARGG

SEQ ID NO: 804 - protein, 50 aa, Homo sapiens
LQVTSVLSRLSLFPHPHIHEYLLDPYVNLAPGCRSLFSVIVRVVGDLMLG

SEQ ID NO: 805 - protein, 50 aa, Homo sapiens
LLVNQTELFVPSLNVDGQPIFANITLPVYTLKERCLQVVRSLVKPENYRG

SEQ ID NO: 806 - protein, 50 aa, Homo sapiens
KFLPVLKEILDRDPLSQLCENEMDLIWTLRQDCREIFPQSLPKLLLSIKG

SEQ ID NO: 807 - protein, 50 aa, Homo sapiens
GGGGGGGGGGGGGGGGGGGGGGGGGMVEAANGMHWPLPFILCPLSGFIFF

SEQ ID NO: 808 - protein, 50 aa, Homo sapiens
AEFNGDGAFLHDNHEQMPTEIEFPESRKPISTKSQFLKHQQTHNIEKAHG

SEQ ID NO: 809 - protein, 50 aa, Homo sapiens
FLAYYVSTSPKAKEPLPLPLGDCSSGGAAGPGPARPPVPPRPPRPPETAG

SEQ ID NO: 810 - protein, 50 aa, Homo sapiens
MPWSSPRVQRHFRCGVCGKSFRRKLCLLRHLAAHTGRGPFRNADGEMCFG

SEQ ID NO: 811 - protein, 50 aa, Homo sapiens
RKVLREQEKNWPCYECNRRFISSEQLQQHLNSHDEKLDVFSRTRGRGRGG

SEQ ID NO: 812 - protein, 50 aa, Homo sapiens
ATSYTPNLARGDPGLATIAKSATIEPKEVKPETKPPEPKKTFNSVSKIDG

SEQ ID NO: 813 - protein, 50 aa, Homo sapiens
ARPGQYITLHCPSVSALENHPFTLTMCPTETKATFGVHLKIVGDWTERFG

SEQ ID NO: 814 - protein, 50 aa, Homo sapiens
SMGIWMAAIGPKRYQDSLWLCEKTCETGMLSSPQYSPWELTELWKLKERG

SEQ ID NO: 815 - protein, 50 aa, Homo sapiens
KVQNSKMSEASGIQQEDSYPKGSKNIKNSPRKCLTDTNLFQKNSSFHPIG

SEQ ID NO: 816 - protein, 50 aa, Homo sapiens
IKDAKVLEKKVNEFCNRSSHLDPSDILELGARIFVSSIKNGMWCRGTITG

SEQ ID NO: 817 - protein, 50 aa, Homo sapiens
PYNPGPPGPAPHGPPAPYAPQGWGNAYPHWQQQAPPDPAKAGTDPNSAAG

SEQ ID NO: 818 - protein, 50 aa, Homo sapiens
ADDYGDYVLPDHLRSAPTSFDVTARPHRGTAWTKSGFPEVLQEEYGRGRG

SEQ ID NO: 819 - protein, 50 aa, Homo sapiens
GGGGGGGGGMASASTSKYNSHSLENESIKRTSRDGVNRDLTEAVPRLPGG

SEQ ID NO: 820 - protein, 50 aa, Homo sapiens
SLVAKEIPTNKQEAEIPGANLNVEGTSTPLLRIAWARIILDEAHNVKNPG

SEQ ID NO: 821 - protein, 50 aa, Homo sapiens
KGLKKLWNRVKWTRDEDDKLKKLVEQHGTDDWTLIASHLQNRSDFQCQHG

SEQ ID NO: 822 - protein, 50 aa, Homo sapiens
PQCKDSTGKCGPPPPIDNGDITSFPLSVYAPASSVEYQCQNLYQLEGNKG

SEQ ID NO: 823 - protein, 50 aa, Homo sapiens
ELLDKKNRLSANSQSPDFKMSQIDLQEKNQLDDSLNQIRKLQRSLDEEKG

SEQ ID NO: 824 - protein, 50 aa, Homo sapiens
SHIVKKINNLNKSALKYYQLFLDSLRDPNKVFPEHIGEDVLRPAMLAKFG

SEQ ID NO: 825 - protein, 50 aa, Homo sapiens
GGGGGGGGGGGGGGGGGGGGGGGGGMLSSLGCLLLCGSITLALGNAQKLP

SEQ ID NO: 826 - protein, 50 aa, Homo sapiens
VHAIQIKTKLCQLVEVMMARRDDLSFCQEMKFRNKMVEYLTDWVMGTSNG

SEQ ID NO: 827 - protein, 50 aa, Homo sapiens
GGGGGGGGGGGGGGGGGGGGGGGGGMPAVQLLLLACLVWDVGARTAQLRK

SEQ ID NO: 828 - protein, 50 aa, Homo sapiens
IDDLMTPEEKDKLFTAIGYSESTHNLTLPKQYVAHIMTLKLVSTSVTIRG

SEQ ID NO: 829 - protein, 50 aa, Homo sapiens
RVPAPFPSLTKWTLNIVNLRCETQDILKHASNLTKSSSELKKEVDEMEIG

SEQ ID NO: 830 - protein, 50 aa, Homo sapiens
QSPVHVLSQPIRKTTKEDIRKQITFLNAQIDRHCLKMSKVAESKEPSQQG

SEQ ID NO: 831 - protein, 50 aa, Homo sapiens
RAKAGPTLTDENGDDLGLPPSPGDTSYYQDQVDDFHEARSRAALAKGWNG

SEQ ID NO: 832 - protein, 50 aa, Homo sapiens
HELAMMTYHGNSGLLATKSNENGWTTFYEYDSFGRLTNVTFPTGQVSSFG

SEQ ID NO: 833 - protein, 50 aa, Homo sapiens
QASGEVPSQASLRGFFTEDEPGCFGEGENLPEALQNIQDEGTGEQLSPQG

SEQ ID NO: 834 - protein, 50 aa, Homo sapiens
GGPGDEPLEPAREQGSLDAERNQRGSFEAPRYEGSFPAGPPPTRALPLPG

SEQ ID NO: 835 - protein, 50 aa, Homo sapiens
FKEVWVSTAARNATIYDKVFRCLPNDEVHNLIQLRDFINKPVLAKEDPIG

SEQ ID NO: 836 - protein, 50 aa, Homo sapiens
SCSSMSDPGLNTGGWNIAGREAEHLSSPWGESSPEELRFGSLTYSDPREG

SEQ ID NO: 837 - protein, 50 aa, Homo sapiens
AKYYELARKERQLHMQLYPGWSARDNYGKKKRRSREKHQESTTETNWPRG

SEQ ID NO: 838 - protein, 50 aa, Homo sapiens
GGGGGGGGGGGGGGGGGGGGGGGGGGGGGGGGMAQLERSAISGFSSKSRG

SEQ ID NO: 839 - protein, 50 aa, Homo sapiens
NKIEQAMDLVKSHLMYAVREEVEVLKEQIKELVERNSLLERENALLKSLG

SEQ ID NO: 840 - protein, 50 aa, Homo sapiens
DYVDRGYFSIECVLYLWSLKINHPKTLFLLRGNHECRHLTDYFTFKQECG

SEQ ID NO: 841 - protein, 50 aa, Homo sapiens
GDAPSTSVSLTTVQDYVCPLQGSHALCTCCFQPMPDRRAEREQDPRVAPG

SEQ ID NO: 842 - protein, 50 aa, Homo sapiens
LLGHYKWEKFVYLYDTERGFSILQAIMEAAVQNNWQVTARSVGNIKDVQG

SEQ ID NO: 843 - protein, 50 aa, Homo sapiens
DVCQNLESKLKELLKNFSEIACSEDCIVVEGPILDCWTCLRMTNRCFKGG

SEQ ID NO: 844 - protein, 50 aa, Homo sapiens
KKLVPVERNAEPDEQDFEKSNSRKRPRDALQKEEEMEGDYQETWKATGSG

SEQ ID NO: 845 - protein, 50 aa, Homo sapiens
GGGGGGGGGGGGGGGGGGGGGGGGGMQVEPSFLQAENLILRLQMQHPTTE

SEQ ID NO: 846 - protein, 50 aa, Homo sapiens
SVITYSPTTGTCQMSLFASPTSSEEQKHRNGLSNEKRKKLNHPSLTESKG

SEQ ID NO: 847 - protein, 50 aa, Homo sapiens
LFQHLTHPYPSEEQKKQLAQDTGLTILQVNNWFINARRRIVQPMIDQSNG

SEQ ID NO: 848 - protein, 50 aa, Homo sapiens
SGTDLVNISFTYMVAENPEVTKQWVEGLRSIIHNFRANNVSPMTCLKKHG

SEQ ID NO: 849 - protein, 50 aa, Homo sapiens
YPLMPTRPVPSYIQRPDYADHPLGMSESEQALKGTSQIKLLSSEDIEGMG

SEQ ID NO: 850 - protein, 50 aa, Homo sapiens
FHGPAQMKVGCDNTVVRMVSSGKHVNRVTFEYRQLEPYELENPNGNSIGG

SEQ ID NO: 851 - protein, 50 aa, Homo sapiens
QVAQTTGGLSVWQFLELFNSGRCLRGVGRDTLSMAIHEVYQELIQDVLKG

SEQ ID NO: 852 - protein, 50 aa, Homo sapiens
CGGSIIGNQWILTAAHCFYGVESPKILRVYSGILNQSEIKEDTSFFGVQG

SEQ ID NO: 853 - protein, 50 aa, Homo sapiens
WTDLLKQQPTSEATSRCHINLDETQDSKKKLGQIRSEIDLTEAQETVPSG

SEQ ID NO: 854 - protein, 50 aa, Homo sapiens
LSYEGAFTWEFRDEMVNRIWQNDILEREIPLSQPFRLESLLTDDVEISRG

SEQ ID NO: 855 - protein, 50 aa, Homo sapiens
QDVTDDSPPSKKKRMDHVDFDICTKRERNYRSSRQISEDSERTGGSPSVG

SEQ ID NO: 856 - protein, 50 aa, Homo sapiens
GGGGGGGGGGGGGGGGMKYPLMPLVNDLTFSFLVFWFCLPVGLLLLLIIG

SEQ ID NO: 857 - protein, 50 aa, Homo sapiens
GAAVEINFKTMTSEDLLRALRTVITDSSYKENAMRLSRIHHDQPVKPLDG

SEQ ID NO: 858 - protein, 50 aa, Homo sapiens
YQHENGAHSQLAEPQDLPLSTFPTQRDSSLFYHCLKRRDGTRHLDLPCKG

SEQ ID NO: 859 - protein, 50 aa, Homo sapiens
GGGGGGGGGGGGGGGGGGGGGGGGGMWNWLRLVKDSVSEKTIGLMRMQFG

SEQ ID NO: 860 - protein, 50 aa, Homo sapiens
KPVAFAVRTNVSYSAAHEDDVPVPGMAISFEAKDFLHVKEKFNNDWWIGG

SEQ ID NO: 861 - protein, 50 aa, Homo sapiens
FQREMSFYRQAQAAVLAVLPRLHQLKVPTKRPTDYFAEMAKSDLQMQKIG

SEQ ID NO: 862 - protein, 50 aa, Homo sapiens
GGGGGGGGGGGGGMWKSVVGHDVSVSVETQGDDWDTDPDFVNDISEKEQG

SEQ ID NO: 863 - protein, 50 aa, Homo sapiens
GGGGGGGGGGGGGGGGGGGGGGGGGGGMVYSRRGSLGSRLLLLWLLLAYG

SEQ ID NO: 864 - protein, 50 aa, Homo sapiens
GGGGGGGGGGGGGGGGGGMAIHLDKQNIILKNDKDEYLKKTRDGVLPPYG

SEQ ID NO: 865 - protein, 50 aa, Homo sapiens
RVHTGEKPYKCNECDRSFSRNSCLALHRRVHTGEKPYKCYECDKVFSRNG

SEQ ID NO: 866 - protein, 50 aa, Homo sapiens
TIINESLNFKIRDQLVVGQLIPDCYVELEKIILSERKNVPIEFPVIDRKG

SEQ ID NO: 867 - protein, 50 aa, Homo sapiens
RWQRGGNASNSCTVLSLLGAPCAFMGSMAPGHVADFLVADFRRRGVDVSG

SEQ ID NO: 868 - protein, 50 aa, Homo sapiens
RERLEQEQLERERQERERQERLERQERLERQERLERQERLDRERQERQEG

SEQ ID NO: 869 - protein, 50 aa, Homo sapiens
DGRAKLTIPAVTKANSGRYSLKATNGSGQATSTAELLVKAETAPPNFVQG

SEQ ID NO: 870 - protein, 50 aa, Homo sapiens
HLKTISSLKQEVKDTVDGQRILEKKGSAALKDLKRQLHLERKRADKLQEG

SEQ ID NO: 871 - protein, 50 aa, Homo sapiens
EQDVRFRAVLMDQIAVTIVGGHLGLQLNQKALTTFPDVVLVRVPTPSVQG

SEQ ID NO: 872 - protein, 50 aa, Homo sapiens
FMVAGGLMLSSFAPNIYFLFFSYGIVVGLGCGLLYTATVTITCQYFDDRG

SEQ ID NO: 873 - protein, 50 aa, Homo sapiens
PGVDQHGLAQPGEVQRSLVQPGIVQRGLVQPGAVQRGLVQPGAVQRGLVG

SEQ ID NO: 874 - protein, 50 aa, Homo sapiens
EVAGTLSPHVETTFSTEPTGLVLSTVMDRVVAENITQTSREIVISERLGG

SEQ ID NO: 875 - protein, 50 aa, Homo sapiens
KSNKHRMIMFLDELGNVPELPDTTEHSRTDLSRDLAALHEICVAHSDELG

SEQ ID NO: 876 - protein, 50 aa, Homo sapiens
HTGTTIMAVEFDGGVVMGSDSRVSAGIELEEPPLVLAAANVVRNISYKYG

SEQ ID NO: 877 - protein, 50 aa, Homo sapiens
RVFGAAILLTSTLNMLIPSAARVHYGCVIFVRILQGLVEGVTYPACHGIG

SEQ ID NO: 878 - protein, 50 aa, Homo sapiens
HETQFGINHFAGIVYYETQGFLEKNRDTLHGDIIQLVHSSRNKFIKQIFG

SEQ ID NO: 879 - protein, 50 aa, Homo sapiens
LKSGIQGKIPANQLAELWLKLIDEVIEDTRYTLPLTEGKANVTVLDTQIG

SEQ ID NO: 880 - protein, 50 aa, Homo sapiens
GGGGGGMWGVFRRQTTHSSNPPLPGQQSCCNHRDFFCSGAMSEPAGDVRG

SEQ ID NO: 881 - protein, 50 aa, Homo sapiens
DWQKQKGGVRRALFLASRQATLTQTLLIQNGAREDCREMKIYLRNESEFG

SEQ ID NO: 882 - protein, 50 aa, Homo sapiens
KRKQGTKTKSNTWSPKYNETFQFILGKENRPGAYELHLSVKDYCFAREDG

SEQ ID NO: 883 - protein, 50 aa, Homo sapiens
NGLPEVENLSKRYEEIYLKNKDLDARLFLDHDKTLQTDSIDSFETQRTPG

SEQ ID NO: 884 - protein, 50 aa, Homo sapiens
STEGLIFQEVLHLLRGAPQEVTLLLCRPPPGALPELEQEWQTPELSADKG

SEQ ID NO: 885 - protein, 50 aa, Homo sapiens
GSLTPGGAMQPQLGMPGVGPVPLERGQVQMSDPRAPIPRGPVTPGGLPPG

SEQ ID NO: 886 - protein, 50 aa, Homo sapiens
PITCLTIPPRFSIAPSSLDPSNRKPLTVLNKGLENPLPERPREKEEPVVG

SEQ ID NO: 887 - protein, 50 aa, Homo sapiens
LSSSGVFLNNASGREKDECTATPSSFNKCHCGEPEHEETPENRKCAIDEG

SEQ ID NO: 888 - protein, 50 aa, Homo sapiens
SLCGALDYLEPDLAEKNPPLFAQKLQREAAHPTDVSISKTALYSRIGTAG

SEQ ID NO: 889 - protein, 50 aa, Homo sapiens
GGGGGGGGGGGGGGGGGGGGGGGGGGGGMGRSNSRSHSSRSKSRSQSSSG

SEQ ID NO: 890 - protein, 50 aa, Homo sapiens
EGGKIHLELLPNQGMLIKPSSPPMGLLQQEFLPVLQPSIQTADRHHTVTG

SEQ ID NO: 891 - protein, 50 aa, Homo sapiens
YLICSLAVTDLLVAVLVMPLSIIYIVMDRWKLGYFLCEVWLSVDMTCCTG

SEQ ID NO: 892 - protein, 50 aa, Homo sapiens
PDPGSPRLAQNARPMTDGRATEEHPSPFGIPYSKLSQSKHLKARTGGSQG

SEQ ID NO: 893 - protein, 50 aa, Homo sapiens
SLTVITPVKKKRGRPKKQPLLTVETIHEGTSTSPVSPISREFPGTKKRKG

SEQ ID NO: 894 - protein, 50 aa, Homo sapiens
AHPEAQGTTQCQRTEHPVISYKEIGPWLREFRAKNAVDFSQLTFDPGQKG

SEQ ID NO: 895 - protein, 50 aa, Homo sapiens
IYSAIPTEKVDGTCCYVTTYKDQPYLWARLDRKPNKQAEKRFKNFLHSKG

SEQ ID NO: 896 - protein, 50 aa, Homo sapiens
KFEQIVSILDKLIRNPGSLKIITSAAARPSNLLLDQSNVDITTFRTTGDG

SEQ ID NO: 897 - protein, 50 aa, Homo sapiens
SYTMMGTADQPGLIPRLCSGLFERTQKEENEEQSFKVEVSYMEIYNEKVG

SEQ ID NO: 898 - protein, 50 aa, Homo sapiens
AEGNFLFNGNFLLSTSKKEINVQGTRTVIEYSGSNNAVERINSTNRQEKG

SEQ ID NO: 899 - protein, 50 aa, Homo sapiens
KADRTRVMEYINRLDNYDAPDIANIAISNELFEEAFAIFRKFDVNTSAVG

SEQ ID NO: 900 - protein, 50 aa, Homo sapiens
KQLLPKNVQGTKIQSIQPEEIIYFETDKSMVEDLRNRIERTLKSKVMEWG

SEQ ID NO: 901 - protein, 50 aa, Homo sapiens
TLILLLKSLPIGCYFNIYGFGSSYEACFPESVKYTQQTMEEALGRVKLMG

SEQ ID NO: 902 - protein, 50 aa, Homo sapiens
GGGGGGGGGGGGGGGGGGGGGGGGGGGGGGGGGGGGGMCKCCNLFSPNQG

SEQ ID NO: 903 - protein, 50 aa, Homo sapiens
GGGGGGGGGGMSGVVPTAPEQPAGEMENQTKPPDPRPDAPPEYNSHFLPG

SEQ ID NO: 904 - protein, 50 aa, Homo sapiens
SERNQCNFKPQMDLEVKEISLDSYNAQLVQLEAMLRNKELKLQESEKEKG

SEQ ID NO: 905 - protein, 50 aa, Homo sapiens
CCNHQQRPQNYRQIPHSHSVFRNPHRSQKMSQLHRVPFFDQEDPDSYLEG

SEQ ID NO: 906 - protein, 50 aa, Homo sapiens
ELTSSAPACYALAISPDSKVCFSCCSDGNIAVWDLHNQTLVRQFQGHTDG

SEQ ID NO: 907 - protein, 50 aa, Homo sapiens
ICDLSENGRDWKSCVTSINSGIRSLRHDVRRAEARSQSLPAVTPPELEQG

SEQ ID NO: 908 - protein, 50 aa, Homo sapiens
GGGGGGGGGGGGGGGGGGGGGGGGGGGGGGGGGGGGGGGGGGGMADFLPG

SEQ ID NO: 909 - protein, 50 aa, Homo sapiens
EETGKCFFAPDVFNCQAPDTGNMEVLHLYGSEEQKKQWLEPLLQGNITSG

SEQ ID NO: 910 - protein, 50 aa, Homo sapiens
APNCPVVRLSGQRCNIWEFMQGNRPLVLNFGSCTGPSFMFKFDQFKRLIG

SEQ ID NO: 911 - protein, 50 aa, Homo sapiens
GGGGGGGGGGGGGGGGGGGGGGGGGGGGGGGGGGGGGGMFCQLAKTCPVG

SEQ ID NO: 912 - protein, 50 aa, Homo sapiens
ALDETLLDEFYIELDQQLNDLESCVMQEVGVIESPLMYEDSILAVRKYFG

SEQ ID NO: 913 - protein, 50 aa, Homo sapiens
LPTAVVPLRYELSLHPNLTSMTFRGSVTISVQALQVTWNIILHSTGHNIG

SEQ ID NO: 914 - protein, 50 aa, Homo sapiens
GGGGGGGGGGGGGGGGGGGGGGGGGGGGGGGGGGGGGGGGGMNDRLGEDG

SEQ ID NO: 915 - protein, 50 aa, Homo sapiens
SPAETTGQARRCDRKSLLTIRTECRSCALNLGVKCPDGYTMITSGSVGVG

SEQ ID NO: 916 - protein, 50 aa, Homo sapiens
ALDPRQAGQYVLCDVVGQAGDAGQRWQARCFRVFGDSEKPLLIQELWKPG

SEQ ID NO: 917 - protein, 50 aa, Homo sapiens
VFKLIAPLEGYTRSRQIVFILLRTVFLRLASLVVLLFSLWNQITCGGDSG

SEQ ID NO: 918 - protein, 50 aa, Homo sapiens
LYQCGYSTGACEPIGLQVPPEAVNMSLGLSLASTTSPSQLLACGPTVHHG

SEQ ID NO: 919 - protein, 50 aa, Homo sapiens
EMRTEDERVTNHEDGSPVNEPNETTPLTEPEKLPLKEEDGKEALNPETIG

SEQ ID NO: 920 - protein, 50 aa, Homo sapiens
NQVDLCSKKLERAEQLIGGLGGEKTRWSHTALELGQLYINLTGDILISSG

SEQ ID NO: 921 - protein, 50 aa, Homo sapiens
SMSVNASHGKGFSRPARPANRRLPSRWASRSPSAPPALRRTTHNYTISLG

SEQ ID NO: 922 - protein, 50 aa, Homo sapiens
PVKKPHFKGVKKRKWIYDEPQNFPNSGMQRAVQAPRPQNKMSYHRNNKNG

SEQ ID NO: 923 - protein, 50 aa, Homo sapiens
WPVLSLCYLIAPKSQFGRIIHTPFMKFIIHGASYFTFLLLLNLYSLVYNG

SEQ ID NO: 924 - protein, 50 aa, Homo sapiens
PPVLMYVLTSISEGLTTLDTVVSSSCCTSLDYIVTYLFKHIAKEGKKPLG

SEQ ID NO: 925 - protein, 50 aa, Homo sapiens
YNVARLMFLDAERKKAERGKLYFTNLQSKENVPTMINPKPCGHLCCCVVG

SEQ ID NO: 926 - protein, 50 aa, Homo sapiens
GGGGGGGGGGGGGGGGGGGGGGMNDSLFVSLDRLLLEFVFQYEQDISTKG

SEQ ID NO: 927 - protein, 50 aa, Homo sapiens
CSPLNMTSSVCSPAGINSVSSTTASFGSFPVHSPITQGTPLTCSPNVENG

SEQ ID NO: 928 - protein, 50 aa, Homo sapiens
SKGVAFILFLDKDSAQNCTRAINNKQLFGRVIKASIAIDNGRAAEFIRRG

SEQ ID NO: 929 - protein, 50 aa, Homo sapiens
YLNVTDLKTYQIGWDTFCVKWSPHRAATSYRLKLSPADGTRGQEITVRGG

SEQ ID NO: 930 - protein, 50 aa, Homo sapiens
YFMRHFDDSSEVEKILQQLRKNETLFHSCSAPMVCWTVCSCLKQPKVRYG

SEQ ID NO: 931 - protein, 50 aa, Homo sapiens
KIEKEEWKTLPSSLLKLNQLQEWQLHRTGLLKIPEFIGRFQNLIVLDLSG

SEQ ID NO: 932 - protein, 50 aa, Homo sapiens
SKSGFSIQFSTSIAATCNDPGMPQNGTRYGDSREAGDTVTFQCDPGYQLG

SEQ ID NO: 933 - protein, 50 aa, Homo sapiens
DDKPHEILGIPSDTTKYLLEQLEKWTEYRITVTAHTDVGPGPESLSVLIG

SEQ ID NO: 934 - protein, 50 aa, Homo sapiens
TDSKYITKSFNFYVFPKPFNRSSPDVKFVCQSSSIDFLASQGFDFNKVFG

SEQ ID NO: 935 - protein, 50 aa, Homo sapiens
EQELRAQLEQLTTKDHGPVFGPCSQLPRHTLQKAKDELNEREETREEAVG

SEQ ID NO: 936 - protein, 50 aa, Homo sapiens
RKKDALLSALSIQNYHLECNETKSWIREKTKVIESTQDLGNDLAGVMALG

SEQ ID NO: 937 - protein, 50 aa, Homo sapiens
GERPGPACQLCGGPTGEGPCCGAGGPGGGPLLPPRLLYSCRLCTFVSHYG

SEQ ID NO: 938 - protein, 50 aa, Homo sapiens
LTSCYILIITIANIANLASTATAITIQRDWIVVVAGEDRSKLANMNATIG

SEQ ID NO: 939 - protein, 50 aa, Homo sapiens
SVLTKDDWWNLLLKAIYSLCDLSRFQEAELLVDSSLEYYSFYDDRQKRKG

SEQ ID NO: 940 - protein, 50 aa, Homo sapiens
SLDLSWNNFHTRGAVALCNGLRGNVTLTKLDLSMNGFGNEVALALGEVLG

SEQ ID NO: 941 - protein, 50 aa, Homo sapiens
LVALGKSWHPEEFNCAHCKNTMAYIGFVEEKGALYCELCYEKFFAPECGG

SEQ ID NO: 942 - protein, 50 aa, Homo sapiens
CVNQFIISRTQALMLHIDSFIENLFALAGDEEPEVRKNVCRALVMLLEVG

SEQ ID NO: 943 - protein, 50 aa, Homo sapiens
KSDVWSYGILLWEIFSLGVNPYPGIPVDANFYKLIQNGFKMDQPFYATEG

SEQ ID NO: 944 - protein, 50 aa, Homo sapiens
LVDLFSRSGIYIKQVVLCKFHSVFLSQKGQVYTCGHGPGGRLGHGDEQTG

SEQ ID NO: 945 - protein, 50 aa, Homo sapiens
GAGVARDPGFRSNFRRQNGAALTSASILAQQVWGTLVLLQRLEPVHLQLG

SEQ ID NO: 946 - protein, 50 aa, Homo sapiens
SGPAANPEWMRPFSYLECGDLAAGVEALAQERDKWLSRPALLVRAARHYG

SEQ ID NO: 947 - protein, 50 aa, Homo sapiens
DLFPPFSPPPSPRGEVERGPQSPQQHRLFRVLETPVIDNIRWCLDMALSG

SEQ ID NO: 948 - protein, 50 aa, Homo sapiens
LYYEIQNNDIRMEMAFHEASKQLQARMLQAQVTKQKSTGVEDTEERGKRG

SEQ ID NO: 949 - protein, 50 aa, Homo sapiens
YKVKIHETVAKHPAVCSHFTQDFLPVQGIEDSFHKLILRRYEKCGHENLG

SEQ ID NO: 950 - protein, 50 aa, Homo sapiens
GGGGGGGGGGGGGGGGGGGGGGGGGGGGGGMNPFHASCWNTSAELLNKSG

SEQ ID NO: 951 - protein, 50 aa, Homo sapiens
FTIFGSNKENVHSWLILQVNATDALGVPCTENDYKLWSPSDERGNECLLG

SEQ ID NO: 952 - protein, 50 aa, Homo sapiens
RQLLRQREVTDHRLSEVRKGLLINQQSVKLRGYRPKSEKVPDKADSMLTG

SEQ ID NO: 953 - protein, 50 aa, Homo sapiens
YPANQKSPKGKLRLLYECNPVAYIIEQAGGLATTGTQPVLDVKPEAIHQG

SEQ ID NO: 954 - protein, 50 aa, Homo sapiens
AVERELRQLTLRIQELEKRPPTVQEKIIMEEVVKLEKDPDLEKSTEALRG

SEQ ID NO: 955 - protein, 50 aa, Homo sapiens
LNAKKPKKSKSDLAVSNISPPSPDSKSLPRSVEHPKWNWRTKPQSRDFDG

SEQ ID NO: 956 - protein, 50 aa, Homo sapiens
QESLFLPASKANDVLVRWKRAGSYLLEELFEGNLEKECYEEICVYEEARG

SEQ ID NO: 957 - protein, 50 aa, Homo sapiens
LTVSEEVRSRCSLKHRKSLLLTDISMENVPMDTYPIHHGDPSYRTLKETG

SEQ ID NO: 958 - protein, 50 aa, Homo sapiens
GGGGGGGGGGGGGGGGGGGGGMNILEKVVLKVLEDQQNIRLIRELLQTLG

SEQ ID NO: 959 - protein, 50 aa, Homo sapiens
LLQNCCRALWNFTQELQILLKQAVDLDKTFPISQDGFLCTSVLPFYLGAG

SEQ ID NO: 960 - protein, 50 aa, Homo sapiens
YNELMVRNGDPRIRMLEVSRDGRKHSLPQLLDSSSASQEYHIVKKSTRSG

SEQ ID NO: 961 - protein, 50 aa, Homo sapiens
GGGGGGGMRRQPAKVAALLLGLLLECTEAKKHCWYFEGLYPTYYICRSYG

SEQ ID NO: 962 - protein, 50 aa, Homo sapiens
EILDGVELGEPAHKKTGTTVPESIHSFIGDGLVKPEALNKKAIQIINRVG

SEQ ID NO: 963 - protein, 50 aa, Homo sapiens
LYNNLLWSNWSVDALSKMVIIGNSFKGLEERLLARILQKNYPYIAKILKG

SEQ ID NO: 964 - protein, 50 aa, Homo sapiens
GGGGGGMTSALENYINRTVAVITSDGRMIVGTLKGFDQTINLILDESHEG

SEQ ID NO: 965 - protein, 50 aa, Homo sapiens
GVNVQGLSAEEIRNGNLKAILGLFFSLSRYKQQQHHQQQYYQSLVELQQG

SEQ ID NO: 966 - protein, 50 aa, Homo sapiens
TIRNGHDSELLRSLAEELPLEQGFTIVFHGRRSNLDLMANSVEEAQIWMG

SEQ ID NO: 967 - protein, 50 aa, Homo sapiens
NPEGRFPDLTVELNRWDTAFDHEKARKTGLITPKAGFDSDYDQALADIRG

SEQ ID NO: 968 - protein, 50 aa, Homo sapiens
PALLGELCAVLDSCDGALGWRGLAERLSSSWLDVRHIEKYVDQGKSGTRG

SEQ ID NO: 969 - protein, 50 aa, Homo sapiens
GGGGGGGGGGGGGGGGGGGGGGGGGGGGGGGGGGGGGGMAMQAAKRANIG

SEQ ID NO: 970 - protein, 50 aa, Homo sapiens
TFQQIQEEEDDDYPGSYSPQDPSAGPLLTEELIKALQDLENAASGDATVG

SEQ ID NO: 971 - protein, 50 aa, Homo sapiens
GRDVRIRSIKKEVQVIEKQRAVVEFEVNEDDVDAHWYKDGIEINFQVQEG

SEQ ID NO: 972 - protein, 50 aa, Homo sapiens
GGGGGGGGGGGGGGGGGGGGGGGGGGGGGMGSEKLAVVGSPFWMAPEVLG

SEQ ID NO: 973 - protein, 50 aa, Homo sapiens
GGGMQRPSVSRAENYQLLWDTIASLKQCEQAMQHAFIPVNGTEIEYEFEG

SEQ ID NO: 974 - protein, 50 aa, Homo sapiens
LSSVGSLMNGPSFTSKGTKYFHFFNISLCGHEGKKMALCTNNITDFTVKG

SEQ ID NO: 975 - protein, 50 aa, Homo sapiens
LVLKELSEARIRTVMITGDNLQTAITVAKNSEMIPPGSQVIIVEADEPEG

SEQ ID NO: 976 - protein, 50 aa, Homo sapiens
FVTSSFPVILSIEEHCSVEQQRHMAKAFKEVFGDLLLTKPTEASADQLPG

SEQ ID NO: 977 - protein, 50 aa, Homo sapiens
QISHFFSENEDFRCIAGMCVDARGDLIVADSSRKEILHFPKGGGYSVLIG

SEQ ID NO: 978 - protein, 50 aa, Homo sapiens
GEKPYSCNECGKVFSRNSHLARHRNIHTGEKPHSCNECGKVFSRNSHLAG

SEQ ID NO: 979 - protein, 50 aa, Homo sapiens
KRKLFIRSMGEDNVSWRHPTMGSVFIGRLIEHMQEYACSCDVEEIFRKVG

SEQ ID NO: 980 - protein, 50 aa, Homo sapiens
TIDDNKQILKQRFSEAKALGESINEARSKIGISENMAVPLMPDQQEEKLG

SEQ ID NO: 981 - protein, 50 aa, Homo sapiens
GGGGGGGGGGGGGGGGGGGGGGGGGGGGGGGGGGGMLRKIQRWWQLGRLG

SEQ ID NO: 982 - protein, 50 aa, Homo sapiens
AAENISSVVAAFSDLLHVRIPNSYEVSSAPDVPSMGLVSSHRINPGLEYG

SEQ ID NO: 983 - protein, 50 aa, Homo sapiens
GGGGGGGGGGGGGGGGGGMDQVMQFVEPSRQFVKDSIRLVKRCTKPDRKG

SEQ ID NO: 984 - protein, 50 aa, Homo sapiens
GHTENDHHKFHPLPRFEPKNGLIHGVAPRNGFRSKLKEVGQAQLKTGRRG

SEQ ID NO: 985 - protein, 50 aa, Homo sapiens
TLLDLQNNKITEIKDGDFKNLKNLHALILVNNKISKVSPGAFTPLVKLEG

SEQ ID NO: 986 - protein, 50 aa, Homo sapiens
QEEFCLIAQKVHSLLKSAFNSIAIEKEKLKQMVSEQDHSKGHSTQMARLG

SEQ ID NO: 987 - protein, 50 aa, Homo sapiens
KLHEANNELQKKRAIIEDLEPRFNNSSLKIEELQEALRKKEEEMKQMEEG

SEQ ID NO: 988 - protein, 50 aa, Homo sapiens
GTPDRPKALKGPSPEHHKPLCKGSPEQQRHPHPGSSPETLPKHVLSGSPG

SEQ ID NO: 989 - protein, 50 aa, Homo sapiens
PFNQWREKDEFDEFIASMAITLLKILSHSEATHWSEHCCIWRVRCHFGPG

SEQ ID NO: 990 - protein, 50 aa, Homo sapiens
ISYSPLQSDEDTHDIDEKPDDSQEQLFFTESSKDGSLEEDDDSCGFFKKG

SEQ ID NO: 991 - protein, 50 aa, Homo sapiens
GGGGGGGGGGGGGGGGGGGGGGGGGGGGGGGGGGGGGGGGMTSPVLVDIG

SEQ ID NO: 992 - protein, 50 aa, Homo sapiens
QEMEEKGSSMTDGAPLVKIKQSLTKLKQETVEMDIRIGIVEHTLLQSKLG

SEQ ID NO: 993 - protein, 50 aa, Homo sapiens
NCNCSRSYYYPVCGDGVQYFSPCFAGCSNPVAHRKPKVYYNCSCIERKTG

SEQ ID NO: 994 - protein, 50 aa, Homo sapiens
LEEHTDTCLPKQSVYDAYRKYCESLACCRPLSTANFGKIIREIFPDIKAG

SEQ ID NO: 995 - protein, 50 aa, Homo sapiens
EEMKALEADFLTNMHTSKISKAHVPSWKMTLLNVCSLVNNLNSPAEETGG

SEQ ID NO: 996 - protein, 50 aa, Homo sapiens
VHLMKFSPDGEFFATAGKDDCLLKVWYNVENWRTAVTSPDGSSEKQSQGG

SEQ ID NO: 997 - protein, 50 aa, Homo sapiens
KEYVAPRVLQQAFNYLNQGVVHSITWKQMKPHIQNISEDVIFSVMCYKDG

SEQ ID NO: 998 - protein, 50 aa, Homo sapiens
GGGGGMVLESVVADLLNRFLGDYVENLNKSQLKLGIWGGNVALDNLQIKG

SEQ ID NO: 999 - protein, 50 aa, Homo sapiens
ILGITREQSGKYECKAANEVSSADVKQVKVTVNYPPTITESKSNEATTGG

SEQ ID NO: 1000 - protein, 50 aa, Homo sapiens
TISSLKEENSQQQLAAERRLQDVRQKFEDEKKQLIRDNDQAIKVLQDELG

SEQ ID NO: 1001 - protein, 50 aa, Homo sapiens
SHIFLLCPEHIDQAPERSKEDANCAVCDSPGDLLDQFFCTTCGQHYHGMG

SEQ ID NO: 1002 - protein, 50 aa, Homo sapiens
DLLLFQRFTLEKMEWPNHYACEKLLVLLTHYDMIERKLGSRNSNQLQPIG

SEQ ID NO: 1003 - protein, 50 aa, Homo sapiens
EMVPGAADCNITADSSVYPQADAVIVHHWDIMYNPSANLPPPTRPQGQRG

SEQ ID NO: 1004 - protein, 50 aa, Homo sapiens
RKLKNELNEDEILHFAVAEADNIVTLQPFRDKCEPVFLFSVNGKIIEKIG

SEQ ID NO: 1005 - protein, 50 aa, Homo sapiens
NKTDLAKALMKAVKEEGFPIRPHYFWPLLVGRRKEKNVQGIIEILKGMQG

SEQ ID NO: 1006 - protein, 50 aa, Homo sapiens
PGLNVPLMKNGAVQTIAQRSKEEQEKVEADMIQQREEWDRKKKMKVKREG

SEQ ID NO: 1007 - protein, 50 aa, Homo sapiens
VRRLEGELDTARRERDALQLEMSLVQARYESQRIQLESELAVQLEQRVTG

SEQ ID NO: 1008 - protein, 50 aa, Homo sapiens
APLPENSVNFCFDSAFLTVRRVPAEVSNTHQNSYQPGRKHGEQESSKNPG

SEQ ID NO: 1009 - protein, 50 aa, Homo sapiens
VRTHAEIKAFSTQMSINEGQRLVLKANIAGATDVKWVLNGVELTNSEEYG

SEQ ID NO: 1010 - protein, 50 aa, Homo sapiens
LPCDFMQPLGPLQQSPQHQQQMGQVLQQQNIQQGSINSPSTQTFMQTNEG

SEQ ID NO: 1011 - protein, 50 aa, Homo sapiens
RKAEQENEKRRNVENEVSTLKDQLEDLKKVSQNSQLANEKLSQLQKQLEG

SEQ ID NO: 1012 - protein, 50 aa, Homo sapiens
VSPGNPVDSHAYPHIQNSKQPRVPSAKAVTSGLPGDTALLLPPSPRPSPG

SEQ ID NO: 1013 - protein, 50 aa, Homo sapiens
GGGGGGGGGGGGGGGGGGGGGGGGGMKYGLCKNSITLVSEQDRVPKCPKS

SEQ ID NO: 1014 - protein, 50 aa, Homo sapiens
FRYGYPVRLSFSDFLSRYKPLADTFLREKKEQSAAERCRLVLQQCKLQGG

SEQ ID NO: 1015 - protein, 50 aa, Homo sapiens
KLAREELRREEWLQNVNDNMFLPFSSYHKNEKYIPSMHLSSKYGPISYKG

SEQ ID NO: 1016 - protein, 50 aa, Homo sapiens
QLPVSDRHVYKYRCNQCSLAFKTIEKLQLHSQYHVIRAATMCCLCQRSFG

SEQ ID NO: 1017 - protein, 50 aa, Homo sapiens
KSTLNPNAKEFNPRSFSQPKPSTTPTSPRPQAQPSPSMVGHQQPTPVYTG

SEQ ID NO: 1018 - protein, 50 aa, Homo sapiens
RGSMYDRMRRGGDGYDGGYGGFDDYGGYNNYGYGNDGFDDRMRDGRGMGG

SEQ ID NO: 1019 - protein, 50 aa, Homo sapiens
AEIENCSSRMVVPKAAIYQTQAFYAKGKMKEVKQLVANLRGESLSSGKTG

SEQ ID NO: 1020 - protein, 50 aa, Homo sapiens
KMMLATEETSPDLVGIKRDLEALSKQCNKLLDRAQAREEQVEGTIKRLEG

SEQ ID NO: 1021 - protein, 50 aa, Homo sapiens
YDLNSNAFPHPSDGSNLIVATNFMLAFDTCLYLALAIYFEKILPNEYGHG

SEQ ID NO: 1022 - protein, 50 aa, Homo sapiens
SSRNLPPFGEEKGRSWTRCWQPPQSQRCGQTSQTQTPEPPPSNRGPPVGG

SEQ ID NO: 1023 - protein, 50 aa, Homo sapiens
GGGMNQKNVLQGQHEADKIWSKEGFYAVVIFLSIFVIIVTCLMILYRLKG

SEQ ID NO: 1024 - protein, 50 aa, Homo sapiens
ARRQQLVYRQQLAFQHQVWDVAFEETQGLWVLQDCQEAPLVLYRPVGDQG

SEQ ID NO: 1025 - protein, 50 aa, Homo sapiens
TRKSYVYFVIQVLDAFLCAVGLTSYSVLVIRIVQPELKALAIGFHSMIMG

SEQ ID NO: 1026 - protein, 50 aa, Homo sapiens
WSPDISEGREIFKPRQLPGSAIWSIKVGRGSGFPGKRRPRGAGLSGRGGG

SEQ ID NO: 1027 - protein, 50 aa, Homo sapiens
SEDTVISILNTINEVIAENLEAAKKLRETQGIEKLVLINKSGNRSEKEVG

SEQ ID NO: 1028 - protein, 50 aa, Homo sapiens
GSMIRAILEIIVGGVASTSQDMHTYAACTFLAASMKEGKQGIQRNQESVG

SEQ ID NO: 1029 - protein, 50 aa, Homo sapiens
SSGSSPRPSHWAPGQLGWAWSPFSVTCYCCMWIEKPISTGGQSMRRPRPG

SEQ ID NO: 1030 - protein, 50 aa, Homo sapiens
CLGVAALHGLLYSAGGYDGASCLNSAERYDPLTGTWTSVAAMSTRRRYVG

SEQ ID NO: 1031 - protein, 50 aa, Homo sapiens
FVFWIFLQVQGTKDISINIYHSETKDIDNPPRNETTESTEKMYKMSTMRG

SEQ ID NO: 1032 - protein, 50 aa, Homo sapiens
GGGGGGGGGGGGGGGGGGGGGGGGGMNHHPLEEDCPPVLSHRSLDFGQSQ

SEQ ID NO: 1033 - protein, 50 aa, Homo sapiens
LSLIVMLTTLTERGRTKCHQYWPDPPDVMNHGGFHIQCQSEDCTIAYVSG

SEQ ID NO: 1034 - protein, 50 aa, Homo sapiens
EEDSEEEEEGGSEAEQVQGSLVLSNENLGQSLHQEGFSIPLLWLQNCLIG

SEQ ID NO: 1035 - protein, 50 aa, Homo sapiens
HQVIIGDENHLMLIINARNEGEGAYEAELFVMIPEEADYVGIERNNKGFG

SEQ ID NO: 1036 - protein, 50 aa, Homo sapiens
GIIGEIGCSWPLTESERKVLQATAHAQAQLGCPVIIHPGRSSRAPFQIIG

SEQ ID NO: 1037 - protein, 50 aa, Homo sapiens
PLSDYEGQEEEMNGTKMKFGKRNNSRGEAIISGKQRSSHSLDYDKDRVKG

SEQ ID NO: 1038 - protein, 50 aa, Homo sapiens
TTKPLDRSERAIVDTNGITVFGTRILDEEVFEGDIQQFLITGDPKAAYDG

SEQ ID NO: 1039 - protein, 50 aa, Homo sapiens
KEKKKYNVSKISQSKGQKEISVEKKHTWNASLFNSQIHMIAQRRDAMAHG

SEQ ID NO: 1040 - protein, 50 aa, Homo sapiens
KDLAKALAKQCVVFNCSDGLDYKAMGKFFKGLAQAGAWACFDEFNRIEVG

SEQ ID NO: 1041 - protein, 50 aa, Homo sapiens
GGGGGGGGGGGGGGGGGGGGGGGGGGGGGGGGGGGGGGGGGMLSDPVKRG

SEQ ID NO: 1042 - protein, 50 aa, Homo sapiens
SYKSDVADFDGRSSLLYRFNQKLMSTLKDVISLKFKSMQGDGVLFHGEGG

SEQ ID NO: 1043 - protein, 50 aa, Homo sapiens
EGLHDLEHPDVSLADEWSYCNTDLHPEHRHLSQLEAIKLYLKGKEPLLQG

SEQ ID NO: 1044 - protein, 50 aa, Homo sapiens
MALNSMVGSPDTVGMNYGSYMEEKHMPPPNMTTNERRVIVPADPTLWSTD

SEQ ID NO: 1045 - protein, 50 aa, Homo sapiens
MPPAPPGGESGCEERGAADGGQPRHRWDELRQLHGGEAHATPKHDHERAQ

SEQ ID NO: 1046 - protein, 50 aa, Homo sapiens
RWDELRQLHGGEAHATPKHDHERAQSYRASRSYAMEYRPCAAVAGVGGER

SEQ ID NO: 1047 - protein, 50 aa, Homo sapiens
SYRASRSYAMEYRPCAAVAGVGGERIWPSRRQHLVIPEHRWEGTVQDDQG

SEQ ID NO: 1048 - protein, 50 aa, Homo sapiens
IWPSRRQHLVIPEHRWEGTVQDDQGRLPEAHPQLQRRHPSLTSPLPQRDS

SEQ ID NO: 1049 - protein, 50 aa, Homo sapiens
HLVIPEHRWEGTVQDDQGRLPEAHPQLQRRHPSLTSPLPQRDSSSTFDFR

SEQ ID NO: 1050 - protein, 50 aa, Homo sapiens
GGGGGGGGGMPPAPPGGESGCEERGAAGTLLMNAVWPKAGRWWAAQTPLG

SEQ ID NO: 1051 - protein, 50 aa, Homo sapiens
GGSGVWLLRTPPSPSAWPARRCPRHSPPNPSPTSPLSPSWPMFSAPSSPM

SEQ ID NO: 1052 - protein, 50 aa, Homo sapiens
GGGGGGGGGGGGGGGGGGGGMVPASASGEGLRELLLVQEGEVGADMSHEN

SEQ ID NO: 1053 - protein, 50 aa, Homo sapiens
EFKIPLAIKKENADGQTETCTTYSKYKASCSRHFISEDAQERQDKEVFQQ

SEQ ID NO: 1054 - protein, 50 aa, Homo sapiens
AVAIVAGASSESLGTEQRVVGRAAERRVTEEVRGGLPGKDHPGGPEVPSP

SEQ ID NO: 1055 - protein, 50 aa, Homo sapiens
RRVTEEVRGGLPGKDHPGGPEVPSPEGPRGGEAAAGKRGDRPGPEQGPGG

SEQ ID NO: 1056 - protein, 50 aa, Homo sapiens
EGPRGGEAAAGKRGDRPGPEQGPGGSVGPPGQPEEGADAHPVAGEDSGAE

SEQ ID NO: 1057 - protein, 50 aa, Homo sapiens
GPRGGEAAAGKRGDRPGPEQGPGGSVGPPGQPEEGADAHPVAGEDSGAED

SEQ ID NO: 1058 - protein, 50 aa, Homo sapiens
APSQRPTFKQLVEDLDRVLTVTSTDVPGPPPGVPAPGGPPLSTGPIVDLL

SEQ ID NO: 1059 - protein, 50 aa, Homo sapiens
APSQRPTFKQLVEDLDRVLTVTSTDNEESLKKCVEDYLARITQEGQRYQA

SEQ ID NO: 1060 - protein, 50 aa, Homo sapiens
SSGDDSVFAHDLLPPAPPSSGGSRTFKESALRKQSLYLKFDPLLRDSPGR

SEQ ID NO: 1061 - protein, 50 aa, Homo sapiens
METRYNLKSPVLDFSDPFSTEVKPRILLMGLRRSGKSSIQKVVFHKMSPN

SEQ ID NO: 1062 - protein, 50 aa, Homo sapiens
GGGGGGGGGGGGGGGGGGGGGMETRYNLKSPDGSPGQAPPHGDQGLQSEY

SEQ ID NO: 1063 - protein, 50 aa, Homo sapiens
QVPYYLENEPSGYTVREAGPPAFYRKCSKENEENKKQVSKNCRKHEEFLT

SEQ ID NO: 1064 - protein, 50 aa, Homo sapiens
PFLQPHGQQVPYYLENEPSGYTVREAGPPAFYSFKTSDPRCFLKKSPVKN

SEQ ID NO: 1065 - protein, 50 aa, Homo sapiens
MIGLVWRSMEHPGKLLFAPNLLLDRWSPSLKPKYLSLLNSWERSLGFTRK

SEQ ID NO: 1066 - protein, 50 aa, Homo sapiens
PNLLLDRWSPSLKPKYLSLLNSWERSLGFTRKLSRGPRKQRICWRLFRVS

SEQ ID NO: 1067 - protein, 50 aa, Homo sapiens
QVPYYLENEPSGYTVREAGPPAFYRWSPSLKPKYLSLLNSWERSLGFTRK

SEQ ID NO: 1068 - protein, 50 aa, Homo sapiens
GPPAFYRWSPSLKPKYLSLLNSWERSLGFTRKLSRGPRKQRICWRLFRVS

SEQ ID NO: 1069 - protein, 50 aa, Homo sapiens
GIRAWVAWRNRCQNRDVRQYVQGCGVSSFSSTQSQDHIQQVKKSSSRSWI

SEQ ID NO: 1070 - protein, 50 aa, Homo sapiens
LQDNIADAVACAKRVVRDPQGIRAWVAWRNRCQNRDVRQYVQGCGVGRSQ

SEQ ID NO: 1071 - protein, 50 aa, Homo sapiens
FTHDDGYMICCDKCSVWQHIDCMGIDRQHIPDTYLCERCQPSSAKPIFSR

SEQ ID NO: 1072 - protein, 50 aa, Homo sapiens
ETSSATTISTSEDGSYGTDVTRCICGFTHDDGYMICCDKCSTLESPMMEM

SEQ ID NO: 1073 - protein, 50 aa, Homo sapiens
GVLSDPGSGLYDADSELDVFDAYLELFSHAVSSNGNAVEDPMEILITVTD

SEQ ID NO: 1074 - protein, 50 aa, Homo sapiens
DLTHKTGNFKQFNIFCHMLESALTQILVQVKEVLSKLSTLVETTLKETEK

SEQ ID NO: 1075 - protein, 50 aa, Homo sapiens
DLTHKTGNFKQFNIFCHMLESALTQTEKITVCGDTHGQFYDLLNIFELNG

SEQ ID NO: 1076 - protein, 50 aa, Homo sapiens
VSNTTTAQKRKCSQTQCPRKVIKMESEEGKEARLARSSPPLRPRAAVLKR

SEQ ID NO: 1077 - protein, 50 aa, Homo sapiens
LRERLRQCEETIEQLRAENQELKRKLNILTRPRVKMKLDVAQLMKKVTRL

SEQ ID NO: 1078 - protein, 50 aa, Homo sapiens
CEETIEQLRAENQELKRKLNILTRPRLERAKKLQEQREKEMVEKQKQQEI

SEQ ID NO: 1079 - protein, 50 aa, Homo sapiens
SSHSSPGSPKKQKNESNSAGSPADMELDSDEGRKHRSRSRSKENQLLLKT

SEQ ID NO: 1080 - protein, 50 aa, Homo sapiens
SPGSPKKQKNESNSAGSPADMELDSDEGRKHRSRSRSKENQLLLKTGKKT

SEQ ID NO: 1081 - protein, 50 aa, Homo sapiens
IINVTWSDSTSQTIYRRYSKFFDLQVNFKKDTTSKAIHSIFKNAIQLLQE

SEQ ID NO: 1082 - protein, 50 aa, Homo sapiens
ATVVDVEKRRNPSKHYVYIINVTWSDSTSQTIYRRYSKFFDLQWMTALEL

SEQ ID NO: 1083 - protein, 50 aa, Homo sapiens
LGFQLPKPPEPPSVEVEYYTIAEFQSCISDGISFRGGQKAEVYFCTMDIQ

SEQ ID NO: 1084 - protein, 50 aa, Homo sapiens
GGGGGGGGGGGGGGGGGGGGMFTEKTTTYQYPRAILSVDLSGENGAACET

SEQ ID NO: 1085 - protein, 50 aa, Homo sapiens
LERCSSPLTRSSGSSLASRSMFTEKTTTYQYPRAILSVDLSGENGAACET

SEQ ID NO: 1086 - protein, 50 aa, Homo sapiens
SSLEFLERCSSPLTRSSGSSLASRSMFTEKTTTYQYPRAILSVDLSGENE

SEQ ID NO: 1087 - protein, 50 aa, Homo sapiens
GGGGGGGGGGGGGGGGGGGGGGGGGMFTEKTTTYQYPRAILSVDLSGENE

SEQ ID NO: 1088 - protein, 50 aa, Homo sapiens
LETYKLKCKALQEENRDLRKASVTIEDPKWEFPRKNLVLGKTLGEGEFGK

SEQ ID NO: 1089 - protein, 50 aa, Homo sapiens
LETYKLKCKALQEENRDLRKASVTIPALAGLHGEPGLRGCLQDPGGSKVG

SEQ ID NO: 1090 - protein, 50 aa, Homo sapiens
PALAGLHGEPGLRGCLQDPGGSKVGIPSEELGSWKNSRRRRIWKSGQGNG

SEQ ID NO: 1091 - protein, 50 aa, Homo sapiens
GIPSEELGSWKNSRRRRIWKSGQGNGLPSERQSRVHHGGREDAERERLPE

SEQ ID NO: 1092 - protein, 50 aa, Homo sapiens
TRAGMSYYNSPGLHVQHMGTSHGITEDPKWEFPRKNLVLGKTLGEGEFGK

SEQ ID NO: 1093 - protein, 50 aa, Homo sapiens
LETYKLKCKALQEENRDLRKASVTIWHWASTSRGMLTGRSCMWTRQPARP

SEQ ID NO: 1094 - protein, 50 aa, Homo sapiens
WHWASTSRGMLTGRSCMWTRQPARPCCTSMPCGTPLRRCPASAWASISTA

SEQ ID NO: 1095 - protein, 50 aa, Homo sapiens
CCTSMPCGTPLRRCPASAWASISTARTAHGCMRTTGSASRRTPASSTLTG

SEQ ID NO: 1096 - protein, 50 aa, Homo sapiens
RTAHGCMRTTGSASRRTPASSTLTGAWTIAPGRSSVSATAAFPCSPSTSR

SEQ ID NO: 1097 - protein, 50 aa, Homo sapiens
AWTIAPGRSSVSATAAFPCSPSTSRSSCHPHPFVRASASGQAVPAYTSPS

SEQ ID NO: 1098 - protein, 50 aa, Homo sapiens
SSCHPHPFVRASASGQAVPAYTSPSSTPPFQPAAPSSPGSSASQRQGPPS

SEQ ID NO: 1099 - protein, 50 aa, Homo sapiens
STPPFQPAAPSSPGSSASQRQGPPSAFGRTDPQAPSTSSACCLCSSCAPT

SEQ ID NO: 1100 - protein, 50 aa, Homo sapiens
PSAFGRTDPQAPSTSSACCLCSSCAPTSAWPTGSWRVRVCPSAAPRTAWR

SEQ ID NO: 1101 - protein, 50 aa, Homo sapiens
KETLAVNYEKEEEFLTNELSRKLMQEDPKWEFPRKNLVLGKTLGEGEFGK

SEQ ID NO: 1102 - protein, 50 aa, Homo sapiens
IVISPFRLEELTNRLASLQQENKVLNRPSLDSMENQVSVDAFKILEDPKW

SEQ ID NO: 1103 - protein, 50 aa, Homo sapiens
TWRATEPRYPPHSLSYPVQIARTHTNVRIDPSSLSFNMWKEIPIPFYLSV

SEQ ID NO: 1104 - protein, 50 aa, Homo sapiens
RKGRITRSMANEANSEEAITPQQSAELASMELNESSRWTEEEMETAKKGS

SEQ ID NO: 1105 - protein, 50 aa, Homo sapiens
HSYLPELGKSEMEFIESKRPRLELLPDPLLRPSPLLATGQPAGSEDLTKG

SEQ ID NO: 1106 - protein, 50 aa, Homo sapiens
MIQTVPDPAAHIKMGADLNNIVKCQALSDEHVQFLVYQLLRGLKYIHSAG

SEQ ID NO: 1107 - protein, 50 aa, Homo sapiens
MIQTVPDPAAHIKFGLRRPAAPEGGGEEAVAPLPVADPRAQNVPGAAAAQ

SEQ ID NO: 1108 - protein, 50 aa, Homo sapiens
GEEAVAPLPVADPRAQNVPGAAAAQAPEARERHRASGRLHAGHVHRGLQR

SEQ ID NO: 1109 - protein, 50 aa, Homo sapiens
APEARERHRASGRLHAGHVHRGLQRSVLGDHPDGRRPEQHRQVPGAERRA

SEQ ID NO: 1110 - protein, 50 aa, Homo sapiens
SVLGDHPDGRRPEQHRQVPGAERRARSIPGLPAAARAEVHPLGRDHPPGP

SEQ ID NO: 1111 - protein, 50 aa, Homo sapiens
PEQHRQVPGAERRARSIPGLPAAARAEVHPLGRDHPPGPEAQQRGCERGL

SEQ ID NO: 1112 - protein, 50 aa, Homo sapiens
PASQGSCVASETSTGTSVAASFFARIFFPGSHPVRGVQVMKVGKLQLHQG

SEQ ID NO: 1113 - protein, 50 aa, Homo sapiens
IQAHQYLDGTWSLSRTNGVTLYPYQDFFPRKPSRQRGSSDESWQTAATSR

SEQ ID NO: 1114 - protein, 50 aa, Homo sapiens
SRTNGVTLYPYQDFFPRKPSRQRGSSDESWQTAATSRHVSPSNEESETGF

SEQ ID NO: 1115 - protein, 50 aa, Homo sapiens
VATGSLQDGQSPGVYLCEDPICGTQVICNSFTICNAEMQEVGVGLYPSIS

SEQ ID NO: 1116 - protein, 50 aa, Homo sapiens
CNARLVELKRQALRLLLPGPFPGKDADMLTGDEQVWKEVQESLKKIEELK

SEQ ID NO: 1117 - protein, 50 aa, Homo sapiens
LCRQTLPSVRSELECVTNITLANVIRQLGSLNACEAPGPGGDFQCRVQLS

SEQ ID NO: 1118 - protein, 50 aa, Homo sapiens
GKLWCAKKNKKKRKKVLYNANKNDDGMGRVLAQDVYAKDNLPPFPASVKD

SEQ ID NO: 1119 - protein, 50 aa, Homo sapiens
KQELDLNSSMRLKKLAQIPPKTGIDNPMFDTEEGIVLESPHYAVKILVIM

SEQ ID NO: 1120 - protein, 50 aa, Homo sapiens
SARSVSPTTEMVSNESVDYRATFPEGPPSAPAEDRSGTPDSIASSSSAAH

SEQ ID NO: 1121 - protein, 50 aa, Homo sapiens
FSPFFHPGNSIHTQPEVILHQNHEEGPVAVISGEEDSASPLHHINHGITT

SEQ ID NO: 1122 - protein, 50 aa, Homo sapiens
SPFFHPGNSIHTQPEVILHQNHEEDVQHIKRRDIVLKRELGEGAFGKVFL

SEQ ID NO: 1123 - protein, 50 aa, Homo sapiens
KIRLEKEIKSQSSSSSSSHKESSKTNLIQKPQEKKTDDDEITWGNDELPI

SEQ ID NO: 1124 - protein, 50 aa, Homo sapiens
GGGGGGGGGGGGGGGGGGGGGGGGGGGGGGGGGMAFTERVNSSGNRCTCH

SEQ ID NO: 1125 - protein, 50 aa, Homo sapiens
GGGGGGGGGGGGGGGGGGGGGGGGGGGGGGGGGGMAAQSRTSSKIQNLSW

SEQ ID NO: 1126 - protein, 50 aa, Homo sapiens
KTADKHKDVIINQAKMSTREKNSQESAAQLPHHLCLPPPLARLQRNPQLQ

SEQ ID NO: 1127 - protein, 50 aa, Homo sapiens
STREKNSQESAAQLPHHLCLPPPLARLQRNPQLQRSLFESLEGRPWKGDT

SEQ ID NO: 1128 - protein, 50 aa, Homo sapiens
IPSTPKLIPKVTKTADKHKDVIINQVYRRKHQELQAMQMELQSPEYKLSK

SEQ ID NO: 1129 - protein, 50 aa, Homo sapiens
RLEWTRLVDEPGHCADFHPSGTVVAIGTHSGSVPPEAPGAASHADGAAEP

SEQ ID NO: 1130 - protein, 50 aa, Homo sapiens
LLTGGGKDRKIILWDHDLNPEREIERAQPSCPTTSAYHLLWQGCKETHSC

SEQ ID NO: 1131 - protein, 50 aa, Homo sapiens
DRKIILWDHDLNPEREIERAQPSCPTTSAYHLLWQGCKETHSCRDLCSSP

SEQ ID NO: 1132 - protein, 50 aa, Homo sapiens
TGDSGGVMLIWSKTTVEPTPGKGPKRAQPSCPTTSAYHLLWQGCKETHSC

SEQ ID NO: 1133 - protein, 50 aa, Homo sapiens
MLIWSKTTVEPTPGKGPKRAQPSCPTTSAYHLLWQGCKETHSCRDLCSSP

SEQ ID NO: 1134 - protein, 50 aa, Homo sapiens
GGGGGGGGGGGGGGGGGGGGGMGTKAQVERKLLCLFILAILLYVQGDPGV

SEQ ID NO: 1135 - protein, 50 aa, Homo sapiens
GGGGGGGGGGGGGGGGGGGGGMGTKAQVERKLLCLFILAILLYEGAAENS

SEQ ID NO: 1136 - protein, 50 aa, Homo sapiens
KEAETRAEFAERTVAKLEKTIDDLEVYRRKHQELQAMQMELQSPEYKLSK

SEQ ID NO: 1137 - protein, 50 aa, Homo sapiens
EAETRAEFAERTVAKLEKTIDDLEESAAQLPHHLCLPPPLARLQRNPQLQ

SEQ ID NO: 1138 - protein, 50 aa, Homo sapiens
EKTIDDLEESAAQLPHHLCLPPPLARLQRNPQLQRSLFESLEGRPWKGDT

SEQ ID NO: 1139 - protein, 50 aa, Homo sapiens
VAKELQTLHNLRKLFVQDLATRVKKEDPKWEFPRKNLVLGKTLGEGEFGK

SEQ ID NO: 1140 - protein, 50 aa, Homo sapiens
GSAAQKQKISFLENNLEQLTKVHKQEDPKWEFPRKNLVLGKTLGEGEFGK

SEQ ID NO: 1141 - protein, 50 aa, Homo sapiens
MAHASSANIGPFLEKRGCISMPEQEDPKWEFPRKNLVLGKTLGEGEFGKV

SEQ ID NO: 1142 - protein, 50 aa, Homo sapiens
LMAHASSANIGPFLEKRGCISMPEQEDPKWEFPRKNLVLGKTLGEGEFGK

SEQ ID NO: 1143 - protein, 50 aa, Homo sapiens
WMHHWLLFEMSRHSLEQKPTDAPPKDDFWIPETSFILTIIVGIFLVVTIP

SEQ ID NO: 1144 - protein, 50 aa, Homo sapiens
PLLMQALPMGALPQGPMQNATKYGNMTEDHVMHLLQMIFGYQKQVSYLLL

SEQ ID NO: 1145 - protein, 50 aa, Homo sapiens
PLTDRQTDSVLELKAAAENLPVPAEEEEAKNLVSEAIAAGIFNDLGSGSN

SEQ ID NO: 1146 - protein, 50 aa, Homo sapiens
LAKIHNNVKKLQHQLKDVKPTPDFVEKLREMMEEIENAINTFKEEEKMAR

SEQ ID NO: 1147 - protein, 50 aa, Homo sapiens
ILLLGFLYFFVCSLDILSSAFQLVGDDFWIPETSFILTIIVGIFLVVTIP

SEQ ID NO: 1148 - protein, 50 aa, Homo sapiens
AQEGQDVPVKAPETFDNITISREAQDDFWIPETSFILTIIVGIFLVVTIP

SEQ ID NO: 1149 - protein, 50 aa, Homo sapiens
KEAETRAEFAERSVAKLEKTIDDLEGPAVLAPEDGLAMSLHFMTLGGSSL

SEQ ID NO: 1150 - protein, 50 aa, Homo sapiens
IKILTDKLKEAETRAEFAERSVAKLEKTIDDLEGPAVLAPEDGLAMSLHF

SEQ ID NO: 1151 - protein, 50 aa, Homo sapiens
APSQRPTFKQLVEDLDRVLTVTSTDNVMEQFNPGLRNLINLGKNYEKAVN

SEQ ID NO: 1152 - protein, 50 aa, Homo sapiens
GVLACRALPEAHLQAAGGGPGPCPYRDVHRQCYGTVQSWAAKFNKPGEKL

SEQ ID NO: 1153 - protein, 50 aa, Homo sapiens
QLRFLKRQDLLNVLARMMRPVSDQVMLTLQDNSFLSIDKVPSKDAEEMRL

SEQ ID NO: 1154 - protein, 50 aa, Homo sapiens
QLRFLKRQDLLNVLARMMRPVSDQVLSHNIKNVVLRPSGAKQSRLMLTLQ

SEQ ID NO: 1155 - protein, 50 aa, Homo sapiens
PLECPFERQHYPEAYASPSHTKGEQMTMVDTEMPFWPTNFGISSVDLSVM

SEQ ID NO: 1156 - protein, 50 aa, Homo sapiens
SSSSSTPSSLSSSAFLDLQQVGSGVPPFNAFPHAASVYGQFTGQALLSDG

SEQ ID NO: 1157 - protein, 50 aa, Homo sapiens; identical to SEQ ID NO: 1054

SEQ ID NO: 1158 - protein, 50 aa, Homo sapiens; identical to SEQ ID NO: 1055

SEQ ID NO: 1159 - protein, 50 aa, Homo sapiens; identical to SEQ ID NO: 1056

SEQ ID NO: 1160 - protein, 50 aa, Homo sapiens; identical to SEQ ID NO: 1057

SEQ ID NO: 1161 - protein, 50 aa, Homo sapiens; identical to SEQ ID NO: 1058

SEQ ID NO: 1162 - protein, 50 aa, Homo sapiens
VHDHAGVLACRALPEAHLQAAGGGPGPCPYRDVHRRKGDTGGEPGAEEQV

SEQ ID NO: 1163 - protein, 50 aa, Homo sapiens
GNYTCVVENKFGSIRQTYTLDVLERRVTEEVRGGLPGKDHPGGPEVPSPE

SEQ ID NO: 1164 - protein, 50 aa, Homo sapiens
RVTEEVRGGLPGKDHPGGPEVPSPEGPRGGEAAAGKRGDRPGPEQGPGGS

SEQ ID NO: 1165 - protein, 50 aa, Homo sapiens
LVYCVKHYKGDEKIKSFIWELITPTTYGVWAERDSDDERPSFGGKRARDY

SEQ ID NO: 1166 - protein, 50 aa, Homo sapiens
ESAARVVLTSLLACLPAGPRVYFLKDGRAPGAAGRDAHGGQDEHTGAAEA

SEQ ID NO: 1167 - protein, 50 aa, Homo sapiens
PAGPRVYFLKDGRAPGAAGRDAHGGQDEHTGAAEACPEAARPAGEDVGPG

SEQ ID NO: 1168 - protein, 50 aa, Homo sapiens
ALSTALSEKRTLEGELHDLRGQVAKVSVAVGLAVFACLFLSTLLLVLNKC

SEQ ID NO: 1169 - protein, 50 aa, Homo sapiens
SREVSGIKAAYEAELGDARKTLDSVAKERARLQLELSKVREEFKELKARH

SEQ ID NO: 1170 - protein, 50 aa, Homo sapiens
RPKFRELIIEFSKMARDPQRYLVIQLQDKFEHLKMIQQEEIRKLEEEKKQ

SEQ ID NO: 1171 - protein, 50 aa, Homo sapiens
PKFRELIIEFSKMARDPQRYLVIQGLLPFAVVGSTDEVKVGKRMVRGRHY

SEQ ID NO: 1172 - protein, 50 aa, Homo sapiens
SVFTTKWIWYWKNESGTWIQYGEEKTLGRRDSSDDWEIPDGQITVGQRIG

SEQ ID NO: 1173 - protein, 50 aa, Homo sapiens
PMSCDKSTQTPSPPCQAFNHYLSAMGSTTGLSATPPASLPGSLTNVKALQ

SEQ ID NO: 1174 - protein, 50 aa, Homo sapiens
DLSDSPYSVVCKYFQRGYCIYGDRCRKHLVDGTRVMIGRFLMGRLQWDKE

SEQ ID NO: 1175 - protein, 50 aa, Homo sapiens
IYGDRCRKHLVDGTRVMIGRFLMGRLQWDKELDLDHLEQSTRESGMVMWQ

SEQ ID NO: 1176 - protein, 50 aa, Homo sapiens
YKKALELDPDNETYKSNLKIAELKLREAPSPAPGVHDPYQDGQLPPENCR

SEQ ID NO: 1177 - protein, 50 aa, Homo sapiens
CSFGKQFGGKRGCDCLVLEPSEMIVETKHYLTVNLTTLRVWCYACSKEVF

SEQ ID NO: 1178 - protein, 50 aa, Homo sapiens
DIERVNIAFNYDMPEDSDTYLHRVAAMGSQGNLSAEVEQATRRQVQGMQS

SEQ ID NO: 1179 - protein, 50 aa, Homo sapiens
FNYDMPEDSDTYLHRCYPLSPSRWPLQGARCRACRAPSRETESVSWPSFL

SEQ ID NO: 1180 - protein, 50 aa, Homo sapiens
PLSPSRWPLQGARCRACRAPSRETESVSWPSFLAWSATSGPRSTPTTGFL

SEQ ID NO: 1181 - protein, 50 aa, Homo sapiens
FNYDMPEDSDTYLHRCYPLSPSRWPPWAPRGTCLLRWSRLQGARCRACRA

SEQ ID NO: 1182 - protein, 50 aa, Homo sapiens
PWAPRGTCLLRWSRLQGARCRACRAPSRETESVSWPSFLAWSATSGPRST

SEQ ID NO: 1183 - protein, 50 aa, Homo sapiens
TCLLRWSRLQGARCRACRAPSRETESVSWPSFLAWSATSGPRSTPTTGFL

SEQ ID NO: 1184 - protein, 50 aa, Homo sapiens
DIERVNIAFNYDMPEDSDTYLHRVAATRRQVQGMQSSQQRNRERVLAQLL

SEQ ID NO: 1185 - protein, 50 aa, Homo sapiens
ASYKPVFVTEITDDLHFYVQDVETGSTTGLSATPPASLPGSLTNVKALQK

SEQ ID NO: 1186 - protein, 50 aa, Homo sapiens
PTVYEVHPAQYYPSPVPQYAPRVLTQASNPVVCTQPKSPSGTVCTSKNTW

SEQ ID NO: 1187 - protein, 50 aa, Homo sapiens
FNSSHSFLEDLTGLTLLHQETQAAEDLIRDQGFRGDGGSTTGLSATPPAS

SEQ ID NO: 1188 - protein, 50 aa, Homo sapiens
NHWKKTTAGLCLLTWGGHWLYGKHWPQILTSPSPSKSIPIPQPFRPADED

SEQ ID NO: 1189 - protein, 50 aa, Homo sapiens
RPDTDLSREDTGCNLQHISDRENIDGSTTGLSATPPASLPGSLTNVKALQ

SEQ ID NO: 1190 - protein, 50 aa, Homo sapiens
LWSPMPEHYVEGSTVNCVLAFQVENKTLGRRDSSDDWEIPDGQITVGQRI

SEQ ID NO: 1191 - protein, 50 aa, Homo sapiens
QTALEKTRTELFDLKTKYDEETTAKPQILTSPSPSKSIPIPQPFRPADED

SEQ ID NO: 1192 - protein, 50 aa, Homo sapiens
TPALSPSLMADLEGLHLSTSSSVISDLIRDQGFRGDGGSTTGLSATPPAS

SEQ ID NO: 1193 - protein, 50 aa, Homo sapiens
RRLTQQRRPQIPLQSQRAGVKMPEGPQILTSPSPSKSIPIPQPFRPADED

SEQ ID NO: 1194 - protein, 50 aa, Homo sapiens
SLPVSLYLLSQVFLIIHHAPLVNSLAEVILNGDLSEMYAKTEQDIQRSSD

SEQ ID NO: 1195 - protein, 50 aa, Homo sapiens
DEIAQCLVSVPPTRQSLRKLKQRFPRYKGPLLEEQALTKAAEGGLSSPEF

SEQ ID NO: 1196 - protein, 50 aa, Homo sapiens
HLIKEMKPPTSQEEWEAEFQRYQQFPEFKILNHDMTLTEFKLDQVCGSSR

SEQ ID NO: 1197 - protein, 50 aa, Homo sapiens
LIKEMKPPTSQEEWEAEFQRYQQFPEFKILNHDMTLTEFKLDQVCGSSRS

SEQ ID NO: 1198 - protein, 50 aa, Homo sapiens
VDWHLIKEMKPPTSQEEWEAEFQRYQQFPEFKILNHDMTLTEFKLNAYQV

SEQ ID NO: 1199 - protein, 50 aa, Homo sapiens
DDESPGLYGFLNVIVHSATGFKQSSSEKLRVLGYNHNGEWCEAQTKNGQG

SEQ ID NO: 1200 - protein, 50 aa, Homo sapiens
AEISENLRARSNKDAKDPTTKNSLEKALQRPVASDFEPQGLSEAARWNSK

SEQ ID NO: 1201 - protein, 50 aa, Homo sapiens
ELQMLTNSCVKLQTVHSIPLTINKEALRLLREPLQHPGRVGSSSFNGGRR

SEQ ID NO: 1202 - protein, 50 aa, Homo sapiens
ALRLLREPLQHPGRVGSSSFNGGRRAHHHAPLSSPKAQQAHCLWCVPQLR

SEQ ID NO: 1203 - protein, 50 aa, Homo sapiens
AHHHAPLSSPKAQQAHCLWCVPQLRQVGDGTHGHHHEAQAGRGPVRGGVR

SEQ ID NO: 1204 - protein, 50 aa, Homo sapiens
QVGDGTHGHHHEAQAGRGPVRGGVRGRVEEIQPDGGREDLEGGHHGGGRV

SEQ ID NO: 1205 - protein, 50 aa, Homo sapiens
QAGRGPVRGGVRGRVEEIQPDGGREDLEGGHHGGGRVLERSCSHERDQTP

SEQ ID NO: 1206 - protein, 50 aa, Homo sapiens
KHTPASHPDHPLLQDALRISQNFLSSINEEITPRRQSMTVKKGEKPFSGQ

SEQ ID NO: 1207 - protein, 50 aa, Homo sapiens
YPPQTGSYSQAPSQYSQQSSSYGQQNPSYDSVRRGAWGNNMNSGLNKSPP

SEQ ID NO: 1208 - protein, 50 aa, Homo sapiens
RSMSGPDNRGRGRGGFDRGGMSRDPSYDSVRRGAWGNNMNSGLNKSPPLG

SEQ ID NO: 1209 - protein, 50 aa, Homo sapiens
WGLRKNKTNMNYDKLSRALRYYYDKSKPNMNYDKLSRALRYYYDKNIMTK

SEQ ID NO: 1210 - protein, 50 aa, Homo sapiens
TSQPQSSTGGYNQPSLGYGQSNYSYPQVPGSYPMQPVTAPPSYPPTRPFL

SEQ ID NO: 1211 - protein, 50 aa, Homo sapiens; identical to SEQ ID NO: 1207

SEQ ID NO: 1212 - protein, 50 aa, Homo sapiens
SSFRQDHPSSMGVYGQESGGFSGPGENRSMSGPDNRGRGRGGFDRGGMSR

SEQ ID NO: 1213 - protein, 50 aa, Homo sapiens
QSSYGQQPPTSYPPQTGSYSQAPSQYSQQSSSYGQQNVPPHRGLLWALSR

SEQ ID NO: 1214 - protein, 50 aa, Homo sapiens
YPPQTGSYSQAPSQYSQQSSSYGQQNLPYEPPRRSAWTGHGHPTPQSKAA

SEQ ID NO: 1215 - protein, 50 aa, Homo sapiens
TSQPQSSTGGYNQPSLGYGQSNYSYPQVPGSYPMQPVTAPPSYPPTSSGT

SEQ ID NO: 1216 - protein, 50 aa, Homo sapiens
YSYPQVPGSYPMQPVTAPPSYPPTSGFSWPATENQERTPQSMFRNQLCLQ

SEQ ID NO: 1217 - protein, 50 aa, Homo sapiens
VPGSYPMQPVTAPPSYPPTSGFSWPATENQERTPQSMFRNQLCLQSRTAL

SEQ ID NO: 1218 - protein, 50 aa, Homo sapiens
GGYNQPSLGYGQSNYSYPQVPGSYPMQPVTAPPSYPPTSCHYPGRSNTAG

SEQ ID NO: 1219 - protein, 50 aa, Homo sapiens
KEERQEPSTTARKVGRPGRKRKHPPENLMLSILPKHVADEMLKDMKKDES

SEQ ID NO: 1220 - protein, 50 aa, Homo sapiens
LQDMWRLLDLGSSPSGVTSQGDSTPDGPALPPRPVPPSATERHPCRVRPA

SEQ ID NO: 1221 - protein, 50 aa, Homo sapiens
DGPALPPRPVPPSATERHPCRVRPAPTAPHAGLLRPDPGPHRAWHDPVHT

SEQ ID NO: 1222 - protein, 50 aa, Homo sapiens
PTAPHAGLLRPDPGPHRAWHDPVHTSTDPPRAARLRGQHTAHRRDPDSAD

SEQ ID NO: 1223 - protein, 50 aa, Homo sapiens
STDPPRAARLRGQHTAHRRDPDSADRRGGTDGQPAAPPLRPYREAAAQAA

SEQ ID NO: 1224 - protein, 50 aa, Homo sapiens
RRGGTDGQPAAPPLRPYREAAAQAATRLQHPLPVQGPRLAANVRAIRKNF

SEQ ID NO: 1225 - protein, 50 aa, Homo sapiens
GQPAAPPLRPYREAAAQAATRLQHPLPVQGPRLAANVRAIRKNFRRGDHF

SEQ ID NO: 1226 - protein, 50 aa, Homo sapiens; identical to SEQ ID NO: 1136

SEQ ID NO: 1227 - protein, 50 aa, Homo sapiens; identical to SEQ ID NO: 1137

SEQ ID NO: 1228 - protein, 50 aa, Homo sapiens; identical to SEQ ID NO: 1138

SEQ ID NO: 1229 - protein, 50 aa, Homo sapiens; identical to SEQ ID NO: 1126

SEQ ID NO: 1230 - protein, 50 aa, Homo sapiens; identical to SEQ ID NO: 1127

SEQ ID NO: 1231 - protein, 50 aa, Homo sapiens; identical to SEQ ID NO: 1128

SEQ ID NO: 1232 - protein, 50 aa, Homo sapiens
SSSSAAHPPGVQPQQPPYTGAQTQAVYRRKHQELQAMQMELQSPEYKLSK

SEQ ID NO: 1233 - protein, 50 aa, Homo sapiens
SSSSAAHPPGVQPQQPPYTGAQTQAESAAQLPHHLCLPPPLARLQRNPQL

SEQ ID NO: 1234 - protein, 50 aa, Homo sapiens
YTGAQTQAESAAQLPHHLCLPPPLARLQRNPQLQRSLFESLEGRPWKGDT

SEQ ID NO: 1235 - protein, 50 aa, Homo sapiens
AAHPPGVQPQQPPYTGAQTQAGQIEVYRRKHQELQAMQMELQSPEYKLSK

SEQ ID NO: 1236 - protein, 50 aa, Homo sapiens
SDCTNVTFSKVQRFWESNSAAHKEISLGDAQSNYLLTTAENELGVVVAHS

SEQ ID NO: 1237 - protein, 50 aa, Homo sapiens
LSDCTNVTFSKVQRFWESNSAAHKEVEIYKSFRPGDIVLAKVISLGDAQS

SEQ ID NO: 1238 - protein, 50 aa, Homo sapiens
GLSDCTNVTFSKVQRFWESNSAAHKEVSRWFPSAGVRCSALRPTLKNSGK

SEQ ID NO: 1239 - protein, 50 aa, Homo sapiens
GGGMGLLRIMMPPKLQLLAVVAFAVAMLFLENQIQKLEESRSKLDESKML

SEQ ID NO: 1240 - protein, 50 aa, Homo sapiens
GLLRIMMPPKLQLLAVVAFAVAMLFLENQIQKLEESRSKLGLFGVTRPGV

SEQ ID NO: 1241 - protein, 50 aa, Homo sapiens
SGLVPSRFLTLLAHLVVVITLFWSRVPVLRMVEGDTIYDYCWYSLMSSAQ

SEQ ID NO: 1242 - protein, 50 aa, Homo sapiens
GKKRQTEEEEGKDNHCFKNADPCRNFGSLFDLENDLPDELIPNGGELGLL

SEQ ID NO: 1243 - protein, 50 aa, Homo sapiens
ATGPYYSPYALYGQRLTTASALGYQIVVHLTEDLLSRASMTVVNGCPTLT

SEQ ID NO: 1244 - protein, 50 aa, Homo sapiens
TGDSGGVMLIWSKTTVEPTPGKGPKESAAQLPHHLCLPPPLARLQRNPQL

SEQ ID NO: 1245 - protein, 50 aa, Homo sapiens
PTPGKGPKESAAQLPHHLCLPPPLARLQRNPQLQRSLFESLEGRPWKGDT

SEQ ID NO: 1246 - protein, 50 aa, Homo sapiens
TGDSGGVMLIWSKTTVEPTPGKGPKVYRRKHQELQAMQMELQSPEYKLSK

SEQ ID NO: 1247 - protein, 50 aa, Homo sapiens
RAKYHKLKYGTELNQGDMKPPSYDSVYRRKHQELQAMQMELQSPEYKLSK

SEQ ID NO: 1248 - protein, 50 aa, Homo sapiens
RAKYHKLKYGTELNQGDMKPPSYDSESAAQLPHHLCLPPPLARLQRNPQL

SEQ ID NO: 1249 - protein, 50 aa, Homo sapiens
MKPPSYDSESAAQLPHHLCLPPPLARLQRNPQLQRSLFESLEGRPWKGDT

SEQ ID NO: 1250 - protein, 50 aa, Homo sapiens
VPKYASRSCVFRSTVQRFPTTYFIPRAQPSCPTTSAYHLLWQGCKETHSC

SEQ ID NO: 1251 - protein, 50 aa, Homo sapiens
SCVFRSTVQRFPTTYFIPRAQPSCPTTSAYHLLWQGCKETHSCRDLCSSP

SEQ ID NO: 1252 - protein, 50 aa, Homo sapiens
GQYNVLPAPVPKYASRSCVFRSTVQRFPTTYFIPAPFSFSTPQLTPSTPS

SEQ ID NO: 1253 - protein, 50 aa, Homo sapiens
YGVVYKARNKLTGEVVALKKIRLDTRAQPSCPTTSAYHLLWQGCKETHSC

SEQ ID NO: 1254 - protein, 50 aa, Homo sapiens
RNKLTGEVVALKKIRLDTRAQPSCPTTSAYHLLWQGCKETHSCRDLCSSP

SEQ ID NO: 1255 - protein, 50 aa, Homo sapiens
ENFQKVEKIGEGTYGVVYKARNKLTGEVVALKKIRLDTCHPPRSHTCHSR

SEQ ID NO: 1256 - protein, 50 aa, Homo sapiens
KEAETRAEFAERSVTKLEKSIDDLEVYRRKHQELQAMQMELQSPEYKLSK

SEQ ID NO: 1257 - protein, 50 aa, Homo sapiens
EAETRAEFAERSVTKLEKSIDDLEESAAQLPHHLCLPPPLARLQRNPQLQ

SEQ ID NO: 1258 - protein, 50 aa, Homo sapiens
EKSIDDLEESAAQLPHHLCLPPPLARLQRNPQLQRSLFESLEGRPWKGDT

SEQ ID NO: 1259 - protein, 50 aa, Homo sapiens
QQEVDRIKEAVRSKNMARRGHSAQIESAAQLPHHLCLPPPLARLQRNPQL

SEQ ID NO: 1260 - protein, 50 aa, Homo sapiens
RRGHSAQIESAAQLPHHLCLPPPLARLQRNPQLQRSLFESLEGRPWKGDT

SEQ ID NO: 1261 - protein, 50 aa, Homo sapiens
VDKLDASESLRKEEEQATETQPIVYESAAQLPHHLCLPPPLARLQRNPQL

SEQ ID NO: 1262 - protein, 50 aa, Homo sapiens
TETQPIVYESAAQLPHHLCLPPPLARLQRNPQLQRSLFESLEGRPWKGDT

SEQ ID NO: 1263 - protein, 50 aa, Homo sapiens
VDKLDASESLRKEEEQATETQPIVYVYRRKHQELQAMQMELQSPEYKLSK

SEQ ID NO: 1264 - protein, 50 aa, Homo sapiens
VSSLKVFTGLAAPSLDTTGCCNHVDGMACTAGSTRSCKPCRWSCRALSTS

SEQ ID NO: 1265 - protein, 50 aa, Homo sapiens
LPYVHIIYQIPTGFFSLLTVRALSRRAQPSCPTTSAYHLLWQGCKETHSC

SEQ ID NO: 1266 - protein, 50 aa, Homo sapiens
YQIPTGFFSLLTVRALSRRAQPSCPTTSAYHLLWQGCKETHSCRDLCSSP

SEQ ID NO: 1267 - protein, 50 aa, Homo sapiens
MMDVKKCGIQDTNSKKQSDTHLEETMAHTTKVNGSASGKAGDILSGDQDK

SEQ ID NO: 1268 - protein, 50 aa, Homo sapiens
LDIAPLDIGGADQEFFVDIGPVCFKMNTTSSAAPPSLGVEFISLLAIILL

SEQ ID NO: 1269 - protein, 50 aa, Homo sapiens
IRRLDDNIRTVVRGQTNVGQDGRQAFAQFDAEGDGTVDAENMLEALKNSS

SEQ ID NO: 1270 - protein, 50 aa, Homo sapiens
KIRRLDDNIRTVVRGQTNVGQDGRQAFAQFDAEGDGTVDAENMLEALKNS

SEQ ID NO: 1271 - protein, 50 aa, Homo sapiens
VEYINTLFPTEQSLANIDEVVNKIRPLPSLMLRVMGQLMPRTCWRPSRIP

SEQ ID NO: 1272 - protein, 50 aa, Homo sapiens
PTEQSLANIDEVVNKIRPLPSLMLRVMGQLMPRTCWRPSRIPVELIFRGS

SEQ ID NO: 1273 - protein, 50 aa, Homo sapiens
MTVFRQENVDDYYDTGEELGRIFHPPSDYGSSSAKQLASNSKVCGKHKGR

SEQ ID NO: 1274 - protein, 50 aa, Homo sapiens
NVDDYYDTGEELGRIFHPPSDYGSSSAKQLASNSKVCGKHKGRPRIQAHH

SEQ ID NO: 1275 - protein, 50 aa, Homo sapiens
GGGGGGGGGGMQDTGSVVPLHWFGFGYAALVASGGIIGYVKAESSPIFTL

SEQ ID NO: 1276 - protein, 50 aa, Homo sapiens
ITQVSIYEVDKQDCRKFCTTGIDGAMTIWDFKARRTQDRNLERGVSPGLL

SEQ ID NO: 1277 - protein, 50 aa, Homo sapiens
RPVCLDYYSLVRLPSVPIITKCTSIRRTGASGARRTQDRNLERGVSPGLL

SEQ ID NO: 1278 - protein, 50 aa, Homo sapiens
FTTLKPTDCCRPPPTAALHQLLSPAAFPVDVDHAVLSARVFGSASLRAEA

SEQ ID NO: 1279 - protein, 50 aa, Homo sapiens
LNRYISDTFWKARGLAKDWVFTTLKPTDCCRPPPTAALHQLLSPAAFPVD

SEQ ID NO: 1280 - protein, 50 aa, Homo sapiens
FTTLKPTDCCRPPPTAALHQLLSPAAFPVDVDHAVLSARVFGSGSLRAEA

SEQ ID NO: 1281 - protein, 50 aa, Homo sapiens
IQKHPELNISEEGITKSTLTKAERQLKDKFDGRPTKPPPNSYSLYCAELI

SEQ ID NO: 1282 - protein, 50 aa, Homo sapiens
DYGRYECEVTNELEDDAGMVKLDLEDGEEKNPDLPHPGPKESAGDVHQAE

SEQ ID NO: 1283 - protein, 50 aa, Homo sapiens
VTNELEDDAGMVKLDLEDGEEKNPDLPHPGPKESAGDVHQAEVRADEEGL

SEQ ID NO: 1284 - protein, 50 aa, Homo sapiens
DKEGIPPDQQRLIFAGKQLEDGRTLSDYNIQKESTLHLVLRLRGGIIEPS

SEQ ID NO: 1285 - protein, 50 aa, Homo sapiens
RSMNSQYLKLLSSQKYQILLYNGDVDMACNFMGDEWFVDSLNQKMEVQRF

SEQ ID NO: 1286 - protein, 50 aa, Homo sapiens
PEYKNNKLFLTGESYAGIYIPTLAVLVMQDPSMNLQVQGAGCGQWTLLLF

SEQ ID NO: 1287 - protein, 50 aa, Homo sapiens
TQHFYLNFTITNLPYSQDKAQPGTTNYQCGRVCRGQRRLSAELCQHDGQL

SEQ ID NO: 1288 - protein, 50 aa, Homo sapiens
KMSSQAAQGNSTWPAPAEETGSSPAEYLKDASKKMKNGLMFVKLVNPCSG

SEQ ID NO: 1289 - protein, 50 aa, Homo sapiens
DALNQLFRNSSIKSYFSDCQVSTFRTPPILRTSPTSPSSPRPWTPCRTSW

SEQ ID NO: 1290 - protein, 50 aa, Homo sapiens
SFSRTSMSGPEQSTMSQDISIGTIPRISASSVLTESAKMTITTQTGTVGI

SEQ ID NO: 1291 - protein, 50 aa, Homo sapiens
EMMITTPYVFPDVPETTSSLATSLGLGGGGLGWLWEFWKLPSFVAQANRA

SEQ ID NO: 1292 - protein, 50 aa, Homo sapiens
LQYEEDMHHPGSRKFNTTERVLQGLETPSGCTRYWAPSSRTSTLRPCSLS

SEQ ID NO: 1293 - protein, 50 aa, Homo sapiens
ETPSGCTRYWAPSSRTSTLRPCSLSWRRTPARQPPRSAPHQTPRCWASHW

SEQ ID NO: 1294 - protein, 50 aa, Homo sapiens
CTRYWAPSSRTSTLRPCSLSWRRTPARQPPRSAPHQTPRCWASHWSWGCR

SEQ ID NO: 1295 - protein, 50 aa, Homo sapiens
AGSLFTPLTTPGMSTLASESVTSRTNGQQQQLLPDTWGRAPQWVPGASLR

SEQ ID NO: 1296 - protein, 50 aa, Homo sapiens
NGQQQQLLPDTWGRAPQWVPGASLRLLLPPYAGWTLPARRSDHSPAPASS

SEQ ID NO: 1297 - protein, 50 aa, Homo sapiens
LEFELRREIKRLQEYRTAGITNFCSGERLKKKNCLKPPALAQILRVEICT

SEQ ID NO: 1298 - protein, 50 aa, Homo sapiens
LEFELRREIKRLQEYRTAGITNFCSGERLKKKNCLKPPALAQILRVEVRM

SEQ ID NO: 1299 - protein, 50 aa, Homo sapiens
ELRREIKRLQEYRTAGITNFCSGERLKKKNCLKPPALAQILRVEVRMRKI

SEQ ID NO: 1300 - protein, 50 aa, Homo sapiens
GWFLGWDDDYWSVDPLDRAMAELAAMATQADLMELDMAMEPDRKAAVSHW

SEQ ID NO: 1301 - protein, 50 aa, Homo sapiens
GWFLGWDDDYWSVDPLDRAMAELAAMELDMAMEPDRKAAVSHWQQQSYLD

SEQ ID NO: 1302 - protein, 50 aa, Homo sapiens
GTQQQAQSMTTTIKPGDDWKKTLKLPPKDLRIKTSLPGINSELLSHQNYP

SEQ ID NO: 1303 - protein, 50 aa, Homo sapiens
DLVIYLEQRKEPYKVKIHETVAKHPGQDRSEATLIKRFKGEGVRYKAKLI

SEQ ID NO: 1304 - protein, 50 aa, Homo sapiens
VTCGQDKLVHLWSSDSHQPLWSRIIEDPARSAGFHPSGSVLAVGTVTGSG

SEQ ID NO: 1305 - protein, 50 aa, Homo sapiens
TPRTPLCLSPAGNLTSTSGPWRGAARLIDKTKVTYLKWLPESESLFLASH

SEQ ID NO: 1306 - protein, 50 aa, Homo sapiens
TCGQDKLVHLWSSDSHQPLWSRIIERLIDKTKVTYLKWLPESESLFLASH

SEQ ID NO: 1307 - protein, 50 aa, Homo sapiens
SRSVTQAGGQWHDLGSLQPPPPGFKRLIDKTKVTYLKWLPESESLFLASH

SEQ ID NO: 1308 - protein, 50 aa, Homo sapiens
SELQSIQRLVSGLEAKPDRSRSASPRSCPRCRRMSLTPQWSSPWTTTATW

SEQ ID NO: 1309 - protein, 50 aa, Homo sapiens
RSCPRCRRMSLTPQWSSPWTTTATWTWIASSLRSRPSMRRLPTAAGQKPS

SEQ ID NO: 1310 - protein, 50 aa, Homo sapiens
TWIASSLRSRPSMRRLPTAAGQKPSPGIRPSMRSCSRQLAGMAMTSATPS

SEQ ID NO: 1311 - protein, 50 aa, Homo sapiens
SLRSRPSMRRLPTAAGQKPSPGIRPSMRSCSRQLAGMAMTSATPSMRSLR

SEQ ID NO: 1312 - protein, 50 aa, Homo sapiens
RTQKIIWMPQELDAFQPYPIEIVPGKVFVGNFSQACDQMKRRPNRTRLII

SEQ ID NO: 1313 - protein, 50 aa, Homo sapiens
HVITALRVKKELDAFQPYPIEIVPGKVFVGNFSQACDQMKRRPNRTRLII

SEQ ID NO: 1314 - protein, 50 aa, Homo sapiens
ESVDLECVKYCVVYDNNSSTLEILLKDDDDDSDSDGDGKGTGCISAIPHR

SEQ ID NO: 1315 - protein, 50 aa, Homo sapiens
NGPKVLEFNCRFGDPECQVGNPPTSSHLRGLLPDQSLLQANSVGLMKYPG

SEQ ID NO: 1316 - protein, 50 aa, Homo sapiens
LEFNCRFGDPECQVGNPPTSSHLRGLLPDQSLLQANSVGLMKYPGHSAHL

SEQ ID NO: 1317 - protein, 50 aa, Homo sapiens
FAHITGGGLLENIPRVLPEKLGVDLVPPPRPASRPKLTSGKLSGINEIPR

SEQ ID NO: 1318 - protein, 50 aa, Homo sapiens
CDSCKEGGDLLCCDHCPAAFHLQCCRKSMKSRSRSPAYSRHSSSHSKKKR

SEQ ID NO: 1319 - protein, 50 aa, Homo sapiens
HRLEAVQRTREAEEKLEERLKRVRMLVLSDLPCEEDEMCVNYNDQHPNGW

SEQ ID NO: 1320 - protein, 50 aa, Homo sapiens
FENYIELKADPIVGSLEPGIYAGYFDWKDCLPPTDGRKDFWKQLLVSDPL

SEQ ID NO: 1321 - protein, 50 aa, Homo sapiens
TRAASCPAAKAGGSGGAGVTLDEARMLAVHFDKPGGPENLYVKEVAKPSP

SEQ ID NO: 1322 - protein, 50 aa, Homo sapiens
ALPNNTSSSPQPKKKPLDGEYFTLQARGYHHASFVGRGPEALDGSHGWPG

SEQ ID NO: 1323 - protein, 50 aa, Homo sapiens
YMCNSSCMGGMNRRPILTIITLEDSRDLRFNRIREIPGSAFKKLKNLNTL

SEQ ID NO: 1324 - protein, 50 aa, Homo sapiens
ALPNNTSSSPQPKKKPLDGEYFTLQMSWVQATLLARGLCRAWGGTCGAAL

SEQ ID NO: 1325 - protein, 50 aa, Homo sapiens
PYEPPEVGSDCTTIHYNYMCNSSCMGGMNRRPILTIITLEDSSLLLAGGH

SEQ ID NO: 1326 - protein, 50 aa, Homo sapiens
KTYQGSYGFRLGFLHSGTAKSVTCTGFVKDVHEDSVTIFFENNWQSERQI

SEQ ID NO: 1327 - protein, 50 aa, Homo sapiens
SCGYLDIAEFLIGQGAHVGAVNSEGDTPLDIAEEEAMEELLQNEVNRQDV

SEQ ID NO: 1328 - protein, 50 aa, Homo sapiens
CKTARQLTVRIKNLNMNRAPDNIIKTREKEKMKEAKDARYTNGHLFTTIS

SEQ ID NO: 1329 - protein, 50 aa, Homo sapiens
CKTARQLTVRIKNLNMNRAPDNIIKMKEAKDARYTNGHLFTTISVSGMTM

SEQ ID NO: 1330 - protein, 50 aa, Homo sapiens
QNPVEPIEPVWFSLARKKAKAWSHMAEITQNSKPDHVLRNEASHKSFGLG

SEQ ID NO: 1331 - protein, 50 aa, Homo sapiens
HINEVIKTIIIHHEAIFPSPRELEGPVYEKCMAGGEEYCSVPRPGLHDLS

SEQ ID NO: 1332 - protein, 50 aa, Homo sapiens
FNTYVTLKVQNVKSTTVAVRGDQPSWEQDFMLRILNFLLTTPIHHLPSDS

SEQ ID NO: 1333 - protein, 50 aa, Homo sapiens
RGIQLHKMIRLITHGLGGEGYLNFMDGTAGTPAISTTTTVEIRKSSVMTT

SEQ ID NO: 1334 - protein, 50 aa, Homo sapiens
NNDMVLQKEPAGAVIWGFGTPGATVTVTLRQGQETIMKKVTSVKDGRTST

SEQ ID NO: 1335 - protein, 50 aa, Homo sapiens
GGGMVLQKEPAGAVIWGFGTPGATVTVTLRQGQETIMKKVTSVKDGRTST

SEQ ID NO: 1336 - protein, 50 aa, Homo sapiens
EYGGQGSDPADVAIQLTFLRLMSTEWRPRRRAPSTTSRTRATRPRAGRPR

SEQ ID NO: 1337 - protein, 50 aa, Homo sapiens
WRPRRRAPSTTSRTRATRPRAGRPRGARRPRRRPRRLRRWQRCWWSWSGG

SEQ ID NO: 1338 - protein, 50 aa, Homo sapiens
NFYSSVKQQDYSASVWLRRKDKLEHHFWIKSGGGVPFSSLSPTTGREHWV

SEQ ID NO: 1339 - protein, 50 aa, Homo sapiens
HFWIKSGGGVPFSSLSPTTGREHWVSRARCQTASGNCRSMHEQKYCINSG

SEQ ID NO: 1340 - protein, 50 aa, Homo sapiens
SRARCQTASGNCRSMHEQKYCINSGALLGERREVSPSSQHSGCGHGGTNR

SEQ ID NO: 1341 - protein, 50 aa, Homo sapiens
YCINSGALLGERREVSPSSQHSGCGHGGTNRGRTGESCVHHQGGSPGRPA

SEQ ID NO: 1342 - protein, 50 aa, Homo sapiens
TLCCPHCTLCQIKRDINRRRAMRTFMVVKTFMDMDQDSEDEKQQYLPLAL

SEQ ID NO: 1343 - protein, 50 aa, Homo sapiens
MYDADEGFPPPPGAPPPSLIPTIESGHSSGYDSRSARAFPYGNVAFPHLP

SEQ ID NO: 1344 - protein, 50 aa, Homo sapiens
LEDMIIDSLQWDDHREETEELMRKYEARLYILQQARRDPLTKQISDEYAC

SEQ ID NO: 1345 - protein, 50 aa, Homo sapiens
GGMEKILQMAEGIDIGEMPSYDLVLSKPSKGQKRHLSTCDDVPSKCLCRW

SEQ ID NO: 1346 - protein, 50 aa, Homo sapiens
GEMPSYDLVLSKPSKGQKRHLSTCDVYADGSICLDILQNRWSPTYDVSSI

SEQ ID NO: 1347 - protein, 50 aa, Homo sapiens
GGGGGGGGGGGGGGGGGGMGVQVETISPGDGRTFPKRGQTCVVHYTERFW

SEQ ID NO: 1348 - protein, 50 aa, Homo sapiens
GGGGGGGGGGGGGGGGGGGGGGGGGGGGGGGGGGMGVQVETISPGDERFW

SEQ ID NO: 1349 - protein, 50 aa, Homo sapiens
THYWPLIRFLVPLGITNIAIDFGEQWLRGAASSTSSLLRCAWLMRCIRLR

SEQ ID NO: 1350 - protein, 50 aa, Homo sapiens
PLGITNIAIDFGEQWLRGAASSTSSLLRCAWLMRCIRLRFASFWAYLTFP

SEQ ID NO: 1351 - protein, 50 aa, Homo sapiens
LFLAMMGPLQGDPLWVNVGLLLLSLLGFCLPLYLICYRRQLDCSSRCFWP

SEQ ID NO: 1352 - protein, 50 aa, Homo sapiens
VTSHCLQPGHRNMFPPNLVEACFKQLMMEQSKKSSLMVARSILNNKLISK

SEQ ID NO: 1353 - protein, 50 aa, Homo sapiens
PTADAFMDLIRNMFPPNLVEACFKQLMMEQSKKSSLMVARSILNNKLISK

SEQ ID NO: 1354 - protein, 50 aa, Homo sapiens
SIFEEEQSHGMKLERYIWDDPWFSRWRSVRRQQRTSAGRPSITMSTPGTW

SEQ ID NO: 1355 - protein, 50 aa, Homo sapiens
RWRSVRRQQRTSAGRPSITMSTPGTWTWLPSSLSESLQQRSLKRRSEWTF

SEQ ID NO: 1356 - protein, 50 aa, Homo sapiens
LQGRGRGLHPRRVGAAGPCSEDPVPMEKCEAAAKDIRGETLNHHVNARHL

SEQ ID NO: 1357 - protein, 50 aa, Homo sapiens
QGVNVCGGRCCHGWSKAPGSQRCTKQQEERSREAVEQWRQWHYDGLHPSY

SEQ ID NO: 1358 - protein, 50 aa, Homo sapiens
GAEKQGTFCVDCETYHTAASTLGSQAVFWGDIALDEDDLKLFHIDKARDW

SEQ ID NO: 1359 - protein, 50 aa, Homo sapiens
GGGGGGGGGGGMVKLAKAGKNQGDPKKMAPPPKEVEEDSEDEEMSEENRA

SEQ ID NO: 1360 - protein, 50 aa, Homo sapiens
RAVHTNYHAALRCESLKLAVIKNAWLAERLGGRLFSVIFKYEVPAETCAE

SEQ ID NO: 1361 - protein, 50 aa, Homo sapiens
FDYFNQEVFRDNNGTALLEFDKELSVFKDRLYELDISFPPRIGKMEGKMQ

SEQ ID NO: 1362 - protein, 50 aa, Homo sapiens
GEEQPPQPPLDPQNLARPPAPAQTEALSQLFCSVRTLTAKEELLQTLRQS

SEQ ID NO: 1363 - protein, 50 aa, Homo sapiens
AFCRCSWRGLGGLRPAPWSGRFLRAAIVKEHPPSETEEKNKITAAIFYSI

SEQ ID NO: 1364 - protein, 50 aa, Homo sapiens
GGGGGGGGGGGGGGGGGMAGALVRKAADYVRSKDFRDYLMRIFNRMAEMH

SEQ ID NO: 1365 - protein, 50 aa, Homo sapiens
LLKKGACYGDDACFVARHRSADVLGEDAHHVLLASLLPGAVPAHLHQLCH

SEQ ID NO: 1366 - protein, 50 aa, Homo sapiens
DDACFVARHRSADVLGEDAHHVLLASLLPGAVPAHLHQLCHGWTGDALRG

SEQ ID NO: 1367 - protein, 50 aa, Homo sapiens
YVVRYMGCIEVLRSMRSLDFNTRTQVTRWTAATPRDSGDRTACEPMNGKP

SEQ ID NO: 1368 - protein, 50 aa, Homo sapiens
RGPAGPSGPAGKDGRTGHPGTVGPADGAAAPRPPGWPSRGSRQQVHGEHG

SEQ ID NO: 1369 - protein, 50 aa, Homo sapiens
DGAAAPRPPGWPSRGSRQQVHGEHGPAARVLCGCGGRQRQLPRRKSVWSR

SEQ ID NO: 1370 - protein, 50 aa, Homo sapiens
PAARVLCGCGGRQRQLPRRKSVWSRLLQALERGRERQLRPLWERNPPSLQ

SEQ ID NO: 1371 - protein, 50 aa, Homo sapiens
VLCGCGGRQRQLPRRKSVWSRLLQALERGRERQLRPLWERNPPSLQRLRV

SEQ ID NO: 1372 - protein, 50 aa, Homo sapiens
GGGGGGGGGGGGMRGRGGGRARCPAPLRSLLGAFGARDAAAAARDPAQDG

SEQ ID NO: 1373 - protein, 50 aa, Homo sapiens
CPAPLRSLLGAFGARDAAAAARDPAQDALSACTRTYRRPSRRFIPWISEA

SEQ ID NO: 1374 - protein, 50 aa, Homo sapiens
NLQNNPGAMEHFHMKLFRAQRNLYIYIGGEVFAECLSDSAIFVQSPNCNQ

SEQ ID NO: 1375 - protein, 50 aa, Homo sapiens
VEEATNILTATRKCFRHIALDYVLQVIFHDVAVLTDKLFPIVEAMQKHFS

SEQ ID NO: 1376 - protein, 50 aa, Homo sapiens
MNQPGGAAAPQVTRSYFRILSISQAIPWQQSSSCLPHLPWGTQTSGKHSD

SEQ ID NO: 1377 - protein, 50 aa, Homo sapiens
IPWQQSSSCLPHLPWGTQTSGKHSDILAYCTLLEGHGTSSWCLMGTSRMR

SEQ ID NO: 1378 - protein, 50 aa, Homo sapiens
PWQQSSSCLPHLPWGTQTSGKHSDILAYCTLLEGHGTSSWCLMGTSRMRA

SEQ ID NO: 1379 - protein, 50 aa, Homo sapiens
FIFNGEFKHKLFRIKINQIQMKETVTELLDVSMELGCFLAGALVSSQGPV

SEQ ID NO: 1380 - protein, 50 aa, Homo sapiens
CGKARVLIKSPKGKEVEDGDKFIFNGEFKHKLFRIKINQIQMKETATEQP

SEQ ID NO: 1381 - protein, 50 aa, Homo sapiens
ALPNNTSSSPQPKKKPLDGEYFTLQTLTAHLETRWRRRTKHLLGSRWLWA

SEQ ID NO: 1382 - protein, 50 aa, Homo sapiens
ALPNNTSSSPQPKKKPLDGEYFTLQSPSRRWTLTAHLETRWRRRTKHLLG

SEQ ID NO: 1383 - protein, 50 aa, Homo sapiens
SPSRRWTLTAHLETRWRRRTKHLLGSRWLWAWPSLPASSFLRCSLCSTNV

SEQ ID NO: 1384 - protein, 50 aa, Homo sapiens
SRWLWAWPSLPASSFLRCSLCSTNVDGETSLGSTARLCWLQRMGWPCPCI

SEQ ID NO: 1385 - protein, 50 aa, Homo sapiens
KTYQGSYGFRLGFLHSGTAKSVTCTGVRNVASVCLQIGYPTVASVPHSII

SEQ ID NO: 1386 - protein, 50 aa, Homo sapiens
PAFEAGLCTGDRIIKVNGESVIGKTYSQVIALIQNSQKKFNSRLFERLSI

SEQ ID NO: 1387 - protein, 50 aa, Homo sapiens
RKNRSTASIQPTSDDLVSSAECSSDDEDFVECEPSTGTTCRLWAWTSWSC

SEQ ID NO: 1388 - protein, 50 aa, Homo sapiens
RSTASIQPTSDDLVSSAECSSDDEDFVECEPSTGRSGTTCRLWAWTSWSC

SEQ ID NO: 1389 - protein, 50 aa, Homo sapiens
TVSSSAVSQRSIFTSMRRRSGTTWPPPRECPPSWSKPGPRLVEKRSFSCS

SEQ ID NO: 1390 - protein, 50 aa, Homo sapiens
SAVSQRSIFTSMRRRSGTTWPPPRECPPSWSKPGPRLVEKRSFSCSWHLP

SEQ ID NO: 1391 - protein, 50 aa, Homo sapiens
METSLSLESGHHDVPGPAAVSKRCGMFGMQGDVFGLRATFMEENMQVLQM

SEQ ID NO: 1392 - protein, 50 aa, Homo sapiens
GHHDVPGPAAVSKRCGMFGMQGDVFGLRATFMEENMQVLQMQPRGPLPNI

SEQ ID NO: 1393 - protein, 50 aa, Homo sapiens
GTAGAALLALLAALCPASRALEEKKGNYVVTDHGSCVRACGADSYEMEED

SEQ ID NO: 1394 - protein, 50 aa, Homo sapiens
LFSELAEDKENYKKFYEAFSKNLKLMKEILDKKVEKVTISNRLVSSPCCI

SEQ ID NO: 1395 - protein, 50 aa, Homo sapiens; identical to SEQ ID NO: 1394

SEQ ID NO: 1396 - protein, 50 aa, Homo sapiens
RDPSKIKWGDAGAEYVVESTGVFTTMFVMGVNHEKYDNSLKIISNASCTT

SEQ ID NO: 1397 - protein, 50 aa, Homo sapiens
FEQEMATAASSSSLEKSYELPDGQVTTMYPGIADRMQKEITALAPSTMKI

SEQ ID NO: 1398 - protein, 50 aa, Homo sapiens
GEPRAPWVEQEGPEYWDRETQKYKRQSAYDGKDYIALNEDLRSWTAADTA

SEQ ID NO: 1399 - protein, 50 aa, Homo sapiens; identical to SEQ ID NO: 1396

SEQ ID NO: 1400 - protein, 50 aa, Homo sapiens
YESLKGVDPKFLRNMRFAKKHNKKGLKKMQPQLQFQLRLPNVPRPLQRLQ

SEQ ID NO: 1401 - protein, 50 aa, Homo sapiens
YASGRTTGIVMDSGDGVTHTVPIYEGYSFTTTAEREIVRDIKEKLCYVAL

SEQ ID NO: 1402 - protein, 50 aa, Homo sapiens
SCTTNCLAPLAKVIHDNFGIVEGLMAAGLSRTSSLPLLALPRLWARSSLS

SEQ ID NO: 1403 - protein, 50 aa, Homo sapiens
YTPRCRRWSWARALVRSAGTPSMAPARSRLQTMAMTTQKEAWWRTTWTAP

SEQ ID NO: 1404 - protein, 50 aa, Homo sapiens; identical to SEQ ID NO: 1394

SEQ ID NO: 1405 - protein, 50 aa, Homo sapiens; identical to SEQ ID NO: 1402

SEQ ID NO: 1406 - protein, 50 aa, Homo sapiens; identical to SEQ ID NO: 1396

SEQ ID NO: 1407 - protein, 50 aa, Homo sapiens
RTGEGFLCVFAINNTKSFEDIHHYRTVDTKQAQDLARSYGIPFIETSAKT

SEQ ID NO: 1408 - protein, 50 aa, Homo sapiens
ARSYGIPFIETSAKTRQGVDDAFYTLVREIRKHKEKMSKDGKKKKKKSKT

SEQ ID NO: 1409 - protein, 50 aa, Homo sapiens
LAARTVESRQAQDLARSYGIPYIETSAKTREWRMPSTRWCVRSGSTSCGS

SEQ ID NO: 1410 - protein, 50 aa, Homo sapiens
DLAARTVESRQAQDLARSYGIPYIETSAKTRAAALALAPAPGPSGTPRDP

SEQ ID NO: 1411 - protein, 50 aa, Homo sapiens
GGGMTEYKLVVVGAGGVGKSALTIQLIQNHFVDEYDPTIEGADQTGEGLG

SEQ ID NO: 1412 - protein, 50 aa, Homo sapiens
KRVKDSDDVPMVLVGNKCDLAARTVESRQAQDLARSYGIPYIETSAKTRQ

SEQ ID NO: 1413 - protein, 50 aa, Homo sapiens
DTAGQEEYSAMRDQYMRTGEGFLCVFAINNSKSFADINLYRVLKMLFTHW

SEQ ID NO: 1414 - protein, 50 aa, Homo sapiens
CLLDILDTAGQEEYSAMRDQYMRTGEGFLCVFAINNSKSFADINLYRLSE

SEQ ID NO: 1415 - protein, 50 aa, Homo sapiens
GVGKSALTIQLIQNHFVDEYDPTIEGVEDAFYTLVREIRQYRMKKLNSSD

SEQ ID NO: 1416 - protein, 50 aa, Homo sapiens
LTQEHIEALLDKFGGEHNPPSIYLEVPARCGVTVRDSLKKALMMRGLIPE

SEQ ID NO: 1417 - protein, 50 aa, Homo sapiens
NVHINTIEPVNIDDLIRDQGFRGDGEISRTSARKEVIFILRRQESNENTW

SEQ ID NO: 1418 - protein, 50 aa, Homo sapiens
NVHINTIEPVNIDDLIRDQGFRGDGALQKSPGPQRERKSSSSSEDRNRMK

SEQ ID NO: 1419 - protein, 50 aa, Homo sapiens
GQQGPPGEPGDQGEQGLKGERGSEGIRGGPGRTGLAGAPGPPGVKGSSGL

SEQ ID NO: 1420 - protein, 50 aa, Homo sapiens
QEAYQLLLTDHTVTFLQYQVFSHLKSSVLSPYERQLNLDASVQHLEDGDG

SEQ ID NO: 1421 - protein, 50 aa, Homo sapiens
SFYPWVNILKISFKRKKFFIHQRQKQAKKLLPQEKNVLSQYWTMGSRNTK

SEQ ID NO: 1422 - protein, 50 aa, Homo sapiens
EFTTLADYLHLLQAAAQALNPLGPSAMFYLAAAVSDFYVPVSEMPEHKIQ

SEQ ID NO: 1423 - protein, 50 aa, Homo sapiens
GGGGGGGGGGGGGGGGGGGGGGGGGGMFYLAAAVSDFYVPVSEMPEHKIQ

SEQ ID NO: 1424 - protein, 50 aa, Homo sapiens
GGMAEMDPVAEFPQPPGAARWAEALLRCFTWLRLCQISMFLSLKCLNTRS

SEQ ID NO: 1425 - protein, 50 aa, Homo sapiens
EAKEVEETIEGMLLRLEEFCSLADLKSPAPVPVTYELPTLYRTEDYFPVD

SEQ ID NO: 1426 - protein, 50 aa, Homo sapiens
LQPGLSFLNLGSGTGYLSTMVGLILAPCAVRNLQDLARIYIRRTLRNFIN

SEQ ID NO: 1427 - protein, 50 aa, Homo sapiens
DNFCSYIFTHAKTKTLREGIIVTGKHAINSGAVPCLENAVTALAQLENPA

SEQ ID NO: 1428 - protein, 50 aa, Homo sapiens
LVEKGDVAFVKHQTVPQNTGGKNPDPWAKNLNEKDYELLCLDGTRKPVEE

SEQ ID NO: 1429 - protein, 50 aa, Homo sapiens
TYIYPNIIAMGFPAERLEGVYRNNIDDVVRFLDSKHKNHYKIYNLCTISF

SEQ ID NO: 1430 - protein, 50 aa, Homo sapiens
NIIAMGFPAERLEGVYRNNIDDVVRSSVCGLPAKGEDIFLQFRTHTTGRQ

SEQ ID NO: 1431 - protein, 50 aa, Homo sapiens
MGFPAERLEGVYRNNIDDVVRSSVCGLPAKGEDIFLQFRTHTTGRQVHVL

SEQ ID NO: 1432 - protein, 50 aa, Homo sapiens
EIVSRNKRRYQEDGFDLDLTYIYPNIIAMGFPAERLEGVYRNNIDDVVRE

SEQ ID NO: 1433 - protein, 50 aa, Homo sapiens
SGYVSDYELQDLFKEASLPLPGYKVREIVEKILSVADSNKDGKISFEEFV

SEQ ID NO: 1434 - protein, 50 aa, Homo sapiens
SCVYPLVSSCAHTFSSMSKNARHICYFLDYGAVNLFSLGFLKSRSPDSVR

SEQ ID NO: 1435 - protein, 50 aa, Homo sapiens
GDIPMELINEVMSTITDPAAMLGPEKPNKKILMWLVGLQNVFSHQLPRMP

SEQ ID NO: 1436 - protein, 50 aa, Homo sapiens
DIKGPKLDLKDPKVEVTAPDVEVSLPSVEVDVEAPGAKLDGAWLEGDLSV

SEQ ID NO: 1437 - protein, 50 aa, Homo sapiens
FLKLSAENESTPIQQLLEHFLRQLQRPDTVYYKLAKKILHAGFKMMSKQA

SEQ ID NO: 1438 - protein, 50 aa, Homo sapiens
GGGGGGGGGGGGGGGMEEPQSDPSVEPPLSQETFSDLWKLPPCRPKQWMI

SEQ ID NO: 1439 - protein, 50 aa, Homo sapiens
RTEEENLRKKGEPHHELPPGSTKRAPLPSQRRNHWMENISPFRCYLTYDG

SEQ ID NO: 1440 - protein, 50 aa, Homo sapiens
EENLRKKGEPHHELPPGSTKRAPLPSQRRNHWMENISPFRCYLTYDGVTS

SEQ ID NO: 1441 - protein, 50 aa, Homo sapiens
PFSRTDIKFDGFNINTCREMISLLDNYSAFWTKTRMAWFSSLWPSGCAAC

SEQ ID NO: 1442 - protein, 50 aa, Homo sapiens
FSRTDIKFDGFNINTCREMISLLDNYSAFWTKTRMAWFSSLWPSGCAACW

SEQ ID NO: 1443 - protein, 50 aa, Homo sapiens
TKHPSKPDPSGECNPDLRLRGHQKEGYGLSWNPNLSGHLLSASDDHGIRQ

SEQ ID NO: 1444 - protein, 50 aa, Homo sapiens
MATSSAALPRILGADFNDKILNEPLKHSDFFNVKELFSVRSLFDARVHLG

SEQ ID NO: 1445 - protein, 50 aa, Homo sapiens
TDVSSASTGHATPLPVTSTSSASTGHATPLPVTSTSSVSTGHATPLPVTS

SEQ ID NO: 1446 - protein, 50 aa, Homo sapiens
FHQFRLLPVQFLCPNISVAYRLLEGHRGGHAACLRCRRGTCIRGAGEAVH

SEQ ID NO: 1447 - protein, 50 aa, Homo sapiens
HRGGHAACLRCRRGTCIRGAGEAVHKHAAPRGHLGPADLPGGTLAQRDLG

SEQ ID NO: 1448 - protein, 50 aa, Homo sapiens
RGTCIRGAGEAVHKHAAPRGHLGPADLPGGTLAQRDLGPGQRQLRAGDRT

SEQ ID NO: 1449 - protein, 50 aa, Homo sapiens
TSQDLKSALAKFKEGAEMESSKEDKAEVKRLFRPIEELKKDFDELNVVIE

SEQ ID NO: 1450 - protein, 50 aa, Homo sapiens
FRKKKREQELREMAWSTMKQEQSTRGWRSIQYASRGERHSAYNEWKKALF

SEQ ID NO: 1451 - protein, 50 aa, Homo sapiens
LVEKINEKFSNFFSSMQCAGEVDLHTENEIMINMEFELESNFEVVLNCMN

SEQ ID NO: 1452 - protein, 50 aa, Homo sapiens
IRVQAENDFGKGPEPESVIGYSGEDCLLLEGEQLAEEPVGVSEETASQLP

SEQ ID NO: 1453 - protein, 50 aa, Homo sapiens
RVQAENDFGKGPEPESVIGYSGEDCLLLEGEQLAEEPVGVSEETASQLPW

SEQ ID NO: 1454 - protein, 50 aa, Homo sapiens
VSNGQVRGDSYSEGCLGQTGARIWLFVGFMLAFGSLIASMWILFGGYVAK

SEQ ID NO: 1455 - protein, 50 aa, Homo sapiens
NESAAHNQAGDTSNQSSGPHSPVAAVLRGSVHRRSHSQAESNNGRTQTSS

SEQ ID NO: 1456 - protein, 50 aa, Homo sapiens
EKGAIAIQSGDTSNQSSGPHSPVAAVLRGSVHRRSHSQAESNNGRTQTSS

SEQ ID NO: 1457 - protein, 50 aa, Homo sapiens
KEGIRRVGRRPDQQLQGEGKIIDRRPERRPPRERRFEKPLEEKVTWINQM

SEQ ID NO: 1458 - protein, 50 aa, Homo sapiens
GLLAASQPQAVPPYASENQTCRDQEKEYYEPQHRICCSRCPPGTYVSATF

SEQ ID NO: 1459 - protein, 50 aa, Homo sapiens
TGISLASQLKVPPYASENQTCRDQEKEYYEPQHRICCSRCPPGTYVSATF

SEQ ID NO: 1460 - protein, 50 aa, Homo sapiens
MELEKREKRSLLNKNLEEKLTSKSNDYLTLNAGSQQERDQAKLTCPSEVS

SEQ ID NO: 1461 - protein, 50 aa, Homo sapiens
MWLLGPLCLLLSSAAANPLLCSTARYHCKNGLCIDKSFICDGQNNCQDNS

SEQ ID NO: 1462 - protein, 50 aa, Homo sapiens
RCIPGAWQCDGLPDCFDKSDEKECPNPLLCSTARYHCKNGLCIDKSFICD

SEQ ID NO: 1463 - protein, 50 aa, Homo sapiens
KKKMEESKAKFENLCKLMKEILDKKAEADKNDKAVKDLVVLLFETALLSS

SEQ ID NO: 1464 - protein, 50 aa, Homo sapiens
QEEQSSGMTIFFSLLVLAICIILVHLLIRYRLHFLPESVAVVSLVLRLAP

SEQ ID NO: 1465 - protein, 50 aa, Homo sapiens
YKFENWGACDGGTGTKVRQGTLKKARYNAQCQETIRVTKPCTPKTKAKAK

SEQ ID NO: 1466 - protein, 50 aa, Homo sapiens
GGHEMVVTGSNFLPESKIIFLEKGQVLMKQEHREEIDLSSVPSLPVPHPA

SEQ ID NO: 1467 - protein, 50 aa, Homo sapiens
GGGGGGGGGGGGGGGGGGGGGGGGGGGGGGGGGGGGMPKHTAVEGNTKRM

SEQ ID NO: 1468 - protein, 50 aa, Homo sapiens
LPRYVQHLQRHPHSLLARLLGVHSLRVDRGKKTYFIVMQSVFYPAGRISE

SEQ ID NO: 1469 - protein, 50 aa, Homo sapiens
GGGGGGGGGGGGGGGGGGGGGGGGGGGGGGGGGGGGGMQSVFYPAGRISE

SEQ ID NO: 1470 - protein, 50 aa, Homo sapiens
KIVNKNNVRCLQHFYGPNHEHCFNRVVVSRSGPSTPHVNFLLDSHPVSPE

SEQ ID NO: 1471 - protein, 50 aa, Homo sapiens
YKVFPNSAPLEGGTRLTICGWDFGFRRNNKFDLKKTRVLLGNESCTLTLN

SEQ ID NO: 1472 - protein, 50 aa, Homo sapiens
AHLETRWRRRTKHLLGSRWLWAWPSLPASSFLRCSLCSTNVDGETSLGST

SEQ ID NO: 1473 - protein, 50 aa, Homo sapiens
ACLFLSTLLLVLNKCGRRNKFGINRVHHIKRRDIVLKWELGEGAFGKVFL

SEQ ID NO: 1474 - protein, 50 aa, Homo sapiens
LTVKSWDTMQLRAARSRCTNLLAASPGQCAAAHGGGDAPLVHPLLCGWAA

SEQ ID NO: 1475 - protein, 50 aa, Homo sapiens
RSRCTNLLAASPGQCAAAHGGGDAPLVHPLLCGWAAGTVSALALQWLRAQ

SEQ ID NO: 1476 - protein, 50 aa, Homo sapiens
YTLIAKNEYGKDEKQISAHFMGWPGIDDGLCCGGDCVCGGILPFGNAVSA

SEQ ID NO: 1477 - protein, 50 aa, Homo sapiens
DTQDLYCLNESSKNIPLANLQIPNCGANPNYPDVIYEDYGTAANDIGDTT

SEQ ID NO: 1478 - protein, 50 aa, Homo sapiens
ACVLLVVLFVMINKYGRRSKFGMKGVFSNIDNHGILNLKDNRDHLVPSTH

SEQ ID NO: 1479 - protein, 50 aa, Homo sapiens
FACVLLVVLFVMINKYGRRSKFGMKDVQHIKRRDIVLKRELGEGAFGKVF

SEQ ID NO: 1480 - protein, 50 aa, Homo sapiens
VGANLLVKIGDFGMSRDVYSTDYYRVGGHTMLPIRWMPPESIMYRKFTTE

SEQ ID NO: 1481 - protein, 50 aa, Homo sapiens
QAESLAFHGLPLKIKKEPHSPCSEISSACSQEQPFKFSYGEKCLYNVRSA

SEQ ID NO: 1482 - protein, 50 aa, Homo sapiens
QETWLAEAQVPDNDEQFVPDYQAESYFAASFLNPVTPFLLCRRCQGKDVL

SEQ ID NO: 1483 - protein, 50 aa, Homo sapiens
YFAASFLNPVTPFLLCRRCQGKDVLCTNARCLSQTSPSHHKALSRSTTTQ

SEQ ID NO: 1484 - protein, 50 aa, Homo sapiens
QGKDVLCTNARCLSQTSPSHHKALSRSTTTQCMNTTPWLAVRPAKAFPLL

SEQ ID NO: 1485 - protein, 50 aa, Homo sapiens
TVCSEPSPQSDRASLARCPKTNHRGGSAVGRAQEKAGHELREAEPGPSLL

SEQ ID NO: 1486 - protein, 50 aa, Homo sapiens
LGFCFPDLALQGDTPTATAETCWKGGSAVGRAQEKAGHELREAEPGPSLL

SEQ ID NO: 1487 - protein, 50 aa, Homo sapiens
GGGGGGGGGGGGGGGGGGGGGGGGGGGGGGGGGMKAGCSIVEKPEGGGVS

SEQ ID NO: 1488 - protein, 50 aa, Homo sapiens
KLSRALRYYYNKRILHKTKGKRFTYKFNFNKLVMPNYPFINIRSSAHHQA

SEQ ID NO: 1489 - protein, 50 aa, Homo sapiens
RPDLPYEPPRRSAWTGHGHPTPQSKVPKTEDQRPQLDPYQILGPTSSRLA

SEQ ID NO: 1490 - protein, 50 aa, Homo sapiens
KTEDQRPQLDPYQILGPTSSRLANPVARSSFGSSSWSSCRTAPTPAASPG

SEQ ID NO: 1491 - protein, 50 aa, Homo sapiens
LDPYQILGPTSSRLANPVARSSFGSSSWSSCRTAPTPAASPGKAPTGSSR

SEQ ID NO: 1492 - protein, 50 aa, Homo sapiens
RYMADMGQPGSLKFNITDNVMQHLLRPLFQKSSMGPFYLGCQLISLRPEK

SEQ ID NO: 1493 - protein, 50 aa, Homo sapiens
LYSGCRLTSLRSEKDGAATGVDAICTHRLDPKSPGVDREQLYWELSQLTN

SEQ ID NO: 1494 - protein, 50 aa, Homo sapiens
FLRMTRNGTQLQNFTLDRSSVLVDGDHPPAEEGRRIQRPATVPRLLPVTP

SEQ ID NO: 1495 - protein, 50 aa, Homo sapiens
NGTQLQNFTLDRSSVLVDGDHPPAEEGRRIQRPATVPRLLPVTPRPGGSA

SEQ ID NO: 1496 - protein, 50 aa, Homo sapiens
LDLLHVARDIACGCQYLEENHFIHRHCCQKLPLDLSRPWKSGQDWRLRDG

SEQ ID NO: 1497 - protein, 50 aa, Homo sapiens
IACGCQYLEENHFIHRHCCQKLPLDLSRPWKSGQDWRLRDGPRHLQGELL

SEQ ID NO: 1498 - protein, 50 aa, Homo sapiens
ATPMEAELARRSLAQDAPPLPVPGVLLKEFTVSGNILTMSVQDQDRDGAW

SEQ ID NO: 1499 - protein, 50 aa, Homo sapiens
LEICLKLVGCKSKKGLSSSSSCYLEALRLLREPLQHPGRVGSSSFNGGRR

SEQ ID NO: 1500 - protein, 50 aa, Homo sapiens; identical to SEQ ID NO: 1202

SEQ ID NO: 1501 - protein, 50 aa, Homo sapiens; identical to SEQ ID NO: 1203

SEQ ID NO: 1502 - protein, 50 aa, Homo sapiens; identical to SEQ ID NO: 1204

SEQ ID NO: 1503 - protein, 50 aa, Homo sapiens; identical to SEQ ID NO: 1205

SEQ ID NO: 1504 - protein, 50 aa, Homo sapiens
YGRDQDTSLCCLCTEASESALPDLTALHRPYGCDVEPQALNEAIRWSSKE

SEQ ID NO: 1505 - protein, 50 aa, Homo sapiens
GSGGFSASLHSEPPVYANLSNFNPGPEGGASDSARDARRDTAPVPHRHGV

SEQ ID NO: 1506 - protein, 50 aa, Homo sapiens
PEGGASDSARDARRDTAPVPHRHGVPGADQGGEEAHEEPHRCLQVPKKEA

SEQ ID NO: 1507 - protein, 50 aa, Homo sapiens
PGADQGGEEAHEEPHRCLQVPKKEAGENRPAGGKSENLESSELGAGVHGQ

SEQ ID NO: 1508 - protein, 50 aa, Homo sapiens
AHEEPHRCLQVPKKEAGENRPAGGKSENLESSELGAGVHGQHAQGTGGTA

SEQ ID NO: 1509 - protein, 50 aa, Homo sapiens
NLADPVGSLKPHLRAKNSDLLTSPDLERLIIQSSNGHITTTPTPTQFLCP

SEQ ID NO: 1510 - protein, 50 aa, Homo sapiens
GYENARRLCDLYYINSPELELEELNECNESHYGTPCQQRCLPPYSSSCHA

SEQ ID NO: 1511 - protein, 50 aa, Homo sapiens
YENARRLCDLYYINSPELELEELNECNESHYGTPCQQRCLPPYSSSCHAG

SEQ ID NO: 1512 - protein, 50 aa, Homo sapiens
LANIMKEISLLPDNLLRTPSVQLVQSWYIQSLQELLDFKDKSAEDAKAIY

SEQ ID NO: 1513 - protein, 50 aa, Homo sapiens
LAVDGFNWELWCRYDALPQAWIDLHDVTAPVKCGSVEGRSRFCPVPGLPT

SEQ ID NO: 1514 - protein, 50 aa, Homo sapiens
LFSHEPALLLESSTRVKPSKAWSHYQSLDFSVDEKVNLLELTWALDNELM

SEQ ID NO: 1515 - protein, 50 aa, Homo sapiens
LIVGILLVPQSIAYSLLAGQEPVYGSDGLLSSGFCFCLPLRCLAEWICHW

SEQ ID NO: 1516 - protein, 50 aa, Homo sapiens
PVYGSDGLLSSGFCFCLPLRCLAEWICHWCLLHYSYISGQVSSWAQPSSD

SEQ ID NO: 1517 - protein, 50 aa, Homo sapiens
STSSASTGHATPVPVTSTSSASTGHATPVPVTSTSSASTGDTTPLPVTNA

SEQ ID NO: 1518 - protein, 50 aa, Homo sapiens
MKEEDLAGDDEDMPTFPCTQKGRPGPRCSRCQKNLSLHTSVRILYLFLAL

SEQ ID NO: 1519 - protein, 50 aa, Homo sapiens
GETGEQGDRGIKGHRGFSGLQGPPGSAGAPGKDGLNGLPGPIGPPGPRGR

SEQ ID NO: 1520 - protein, 50 aa, Homo sapiens
TFLLLQPWPRAQPLLRASYPPFATQQPSLGACVVELELPSHWFSQASTTR

SEQ ID NO: 1521 - protein, 50 aa, Homo sapiens
KLHFSSSYAHKASSIAKSSSFCSMERDEEDSIIVSEGIIEEYLAFDHIDI

SEQ ID NO: 1522 - protein, 50 aa, Homo sapiens
RIYPERATHGGLGLRMELLGCEVEAGPTTPNGNLVDECDDDQANCHSGTG

SEQ ID NO: 1523 - protein, 50 aa, Homo sapiens
PFIDLNYMVYMFQYDSTHGKFHGTVKAVGKVIPELNGKLTGMAFRVPTAN

SEQ ID NO: 1524 - protein, 50 aa, Homo sapiens
MVYMFQYDSTHGKFHGTVKAVGKVIPELNGKLTGMAFRVPTANVSVVDLT

SEQ ID NO: 1525 - protein, 50 aa, Homo sapiens
DVIRPGMRRKVPGEGLPLPKTPEKRGDLIIEFEVIFPERIPQTSRTVLEQ

SEQ ID NO: 1526 - protein, 50 aa, Homo sapiens
MSVTYDDSVGVEVSSDSFWETKEKYEKSLKELDQGTPQYMENMEQVFEQC

SEQ ID NO: 1527 - protein, 50 aa, Homo sapiens
MQIPQAPWPVVWAVLQLGWRPGWFLALLVVTEGDNATFTCSFSNTSESFV

SEQ ID NO: 1528 - protein, 50 aa, Homo sapiens
QLGWRPGWFLDSPDRPWNPPTFSPALLVVTEGDNATFTCSFSNTSESFVL

SEQ ID NO: 1529 - protein, 50 aa, Homo sapiens
ICTGTSSGNQVNLTIQGLRAMDTGLYICKLKKRSPLTTGVYVKMPPTEPE

SEQ ID NO: 1530 - protein, 50 aa, Homo sapiens
TSSGNQVNLTIQGLRAMDTGLYICKIQNRAQILTSSSGSLQQLVRGCFFI

SEQ ID NO: 1531 - protein, 50 aa, Homo sapiens
LTIQGLRAMDTGLYICKIQNRAQILTSSSGSLQQLVRGCFFIAFSSQLFL

SEQ ID NO: 1532 - protein, 50 aa, Homo sapiens
FGFETDLRTHTQGQAFSLSVFHHWQGLSEDVSISKFFDDPMLLELAKQDV

SEQ ID NO: 1533 - protein, 50 aa, Homo sapiens
QWLKHVEVNGSKVGPDGTPYVTVLKQVSLESNASMSSNTPLVRIARLSSG

SEQ ID NO: 1534 - protein, 50 aa, Homo sapiens
QWLKHVEVNGSKVGPDGTPYVTVLKVSLESNASMSSNTPLVRIARLSSGE

SEQ ID NO: 1535 - protein, 50 aa, Homo sapiens
YLCRATNFIGVAEKAFWLSVHGPRAGVPGVQRVHELQHTTGAHRKAVLRG

SEQ ID NO: 1536 - protein, 50 aa, Homo sapiens
GVPGVQRVHELQHTTGAHRKAVLRGGPHAGQCLRARAACRPQMGAVSGPA

SEQ ID NO: 1537 - protein, 50 aa, Homo sapiens
LRGGPHAGQCLRARAACRPQMGAVSGPADPGQAPWGGLLRPGGHGGGHRH

SEQ ID NO: 1538 - protein, 50 aa, Homo sapiens
RVVTIQSAKLGHYMAMNAEGLLYSSRRSGRAWYLGLDKEGQVMKGNRVKK

SEQ ID NO: 1539 - protein, 50 aa, Homo sapiens
MAMNAEGLLYSSRRSGRAWYLGLDKEGQVMKGNRVKKTKAAAHFLPKLLE

SEQ ID NO: 1540 - protein, 50 aa, Homo sapiens
FGFDDLFDDVWPMDPHPRTREDNDLDSQVSQEGLGPVLQPQPKSYFKSIS

SEQ ID NO: 1541 - protein, 50 aa, Homo sapiens
TKKENCPYSILEITSVEIGVVAVKAINSNYYLAMNKKGKLYGSNLTMTVS

SEQ ID NO: 1542 - protein, 50 aa, Homo sapiens
FGFFFCIIWSLVFHFEYTVATDCGPSTKMLSLCSLPHPSGTCSSPAFSGG

SEQ ID NO: 1543 - protein, 50 aa, Homo sapiens
AGEYTCLAGNSIGFSHHSAWLVVLPGVPGVQRVHELQHTTGAHRKAVLRG

SEQ ID NO: 1544 - protein, 50 aa, Homo sapiens
CLLFWAVLVTATLCTARPSPTLPEQALEERPAVMTSPLYLEIIIYCTGAF

SEQ ID NO: 1545 - protein, 50 aa, Homo sapiens
CLLFWAVLVTATLCTARPSPTLPEQDALPSSEDDDDDDDSSSEEKETDNT

SEQ ID NO: 1546 - protein, 50 aa, Homo sapiens
MYSAPSACTCLCLHFLLLCFQVLVAEENVDFRIHVENQTRARDDVSRKQL

SEQ ID NO: 1547 - protein, 50 aa, Homo sapiens
FGFGFSFSPGGGIRFHDNFGFDDLVLSQRHLVRDYGRDRHFGTQCLSIQI

SEQ ID NO: 1548 - protein, 50 aa, Homo sapiens
DAGVYVCKATNGFGSLSVNYTLVVLARPRFTQPSKMRRRVIARPVGSSVR

SEQ ID NO: 1549 - protein, 50 aa, Homo sapiens
FGFKNVELLFSGLVINTAGEMAGAFVAVFLLAMFYEGLKIARESLLRNRC

SEQ ID NO: 1550 - protein, 50 aa, Homo sapiens
GTPNPTLRWLKNGKEFKPDHRIGGYKTAGVNTTDKEMEVLHLRNVSFEDA

SEQ ID NO: 1551 - protein, 50 aa, Homo sapiens
GTPNPTLRWLKNGKEFKPDHRIGGYKHSGINSSDAEVLTLFNVTEAQSGE

SEQ ID NO: 1552 - protein, 50 aa, Homo sapiens
NGRLPVKWMAPEALFDRVYTHQSDVYGLMRECWHAAPSQRPTFKQLVEAL

SEQ ID NO: 1553 - protein, 50 aa, Homo sapiens
WYFMVNVTDAISSGDDEDDTDGAEDFVSENSNNKSTKPALEPHYGKCGPI

SEQ ID NO: 1554 - protein, 50 aa, Homo sapiens
FGFVQFKNLLEAGKALKGMNMKEIKGEEKSHESKHQESVKKKGREEEDME

SEQ ID NO: 1555 - protein, 50 aa, Homo sapiens
FGFPQASASYILLQFAQYGNILKHVARKALSKDGRIFGESIMIGVKPCID

SEQ ID NO: 1556 - protein, 50 aa, Homo sapiens
LRRRQLYCRTGFHLEIFPNGTIQGTRKDHSRFGKTNPRVCIQRTVRRKLV

SEQ ID NO: 1557 - protein, 50 aa, Homo sapiens
IKGKETEFYLCMNRKGKLVGKPDGTSKECVFIEKVLENNYTALMSAKYSG

SEQ ID NO: 1558 - protein, 50 aa, Homo sapiens
HIQWLKHVEVNGSKVGPDGTPYVTVLKADPGQAPWGGLLRPGGHGGGHRH

SEQ ID NO: 1559 - protein, 50 aa, Homo sapiens
AGEYTCLAGNSIGLSYQSAWLTVLPVLPGVRLFRQVKLIPGTRRASLLQR

SEQ ID NO: 1560 - protein, 50 aa, Homo sapiens
VLPGVRLFRQVKLIPGTRRASLLQRPRLARRPRESRSTSRPTMGVPPGQA

SEQ ID NO: 1561 - protein, 50 aa, Homo sapiens
PRLARRPRESRSTSRPTMGVPPGQAGAWEAPRRGLLWPGSTCRGLWHGPC

SEQ ID NO: 1562 - protein, 50 aa, Homo sapiens
LDFFRVVENQPPATMPLNVSFTNRNYDLDYDSVQPYFYCDEEENFYQQQQ

SEQ ID NO: 1563 - protein, 50 aa, Homo sapiens
GGGGGGGGGGGGGGGGGGGGGGGGGGGGGGGGGGGGGGLDFFRVVENQEL

SEQ ID NO: 1564 - protein, 50 aa, Homo sapiens
APRGNPPKASAAPDCTPSLEAGNPAPAAPCPLGEPKTQACSGSESPSDSE

SEQ ID NO: 1565 - protein, 50 aa, Homo sapiens
ALTNQRIGHFFFWHLKSEMHNKTVSQRFGLLLESYCRACGMYLKHLNRYR

SEQ ID NO: 1566 - protein, 50 aa, Homo sapiens
YCVATFILGIGDRHNSNIMVKDDGQVSGDVLQGLSSYSTACQSLHKSFLN

SEQ ID NO: 1567 - protein, 50 aa, Homo sapiens
RHNSNIMVKDDGQVSGDVLQGLSSYSTACQSLHKSFLNDAWLWNARTTIF

SEQ ID NO: 1568 - protein, 50 aa, Homo sapiens
PSDEYCPACREKGKLKALKTYRISFQESIFLCEDLQMEIVKNLPQKYLQR

SEQ ID NO: 1569 - protein, 50 aa, Homo sapiens
DLVNTTLGVAQVSGMHNASKAFLFQEREIHAAPHVSEKLIQLFRNKSEFT

SEQ ID NO: 1570 - protein, 50 aa, Homo sapiens
QLPMINNVMYFQINNKTGAISLTREVTENIWKAPKPVEMVENSTDPHPIK

SEQ ID NO: 1571 - protein, 50 aa, Homo sapiens
SYFLEWRSVLGSENGVTSLTVELMGLALERQKTAEKERLFLVYAKQWWRE

SEQ ID NO: 1572 - protein, 50 aa, Homo sapiens
LNPGELLIALHNIDSVKCDMKSIIKGVEVPQGVGGLHQVLPAHKAPELPG

SEQ ID NO: 1573 - protein, 50 aa, Homo sapiens
DSVKCDMKSIIKGVEVPQGVGGLHQVLPAHKAPELPGHPAAAAPAAGSRL

SEQ ID NO: 1574 - protein, 50 aa, Homo sapiens
LEKRAQKRAEKKRSKLIDKQLQDEKMGYMCTHRLLLLVRRQPKCRTSKTT

SEQ ID NO: 1575 - protein, 50 aa, Homo sapiens
VIKLMFAGLFFLFFVRFGIGRQLLINSHGSSPLAIFQNKAQHKNRLMLPH

SEQ ID NO: 1576 - protein, 50 aa, Homo sapiens
KLMFAGLFFLFFVRFGIGRQLLINSHGSSPLAIFQNKAQHKNRLMLPHSR

SEQ ID NO: 1577 - protein, 50 aa, Homo sapiens
GVDKTTIIWDAHTGEAKQQFPFHSALDVDWQSNNTFASCSTDMCIHVCKL

SEQ ID NO: 1578 - protein, 50 aa, Homo sapiens
CSQKAKGELCRDFVEALKAVVGGSHVSTAAVVREQHGRDESVHRAASALT

SEQ ID NO: 1579 - protein, 50 aa, Homo sapiens
PDASGPEAKVQEEEHDLVDDDITTGKALTFLLLQPPSPKLPPHSTIRRTA

SEQ ID NO: 1580 - protein, 50 aa, Homo sapiens
GGGGGGGGGGGGGGGGGGGGGGGGGGGGGGGMWERLNCAAEDFYSRLLHL

SEQ ID NO: 1581 - protein, 50 aa, Homo sapiens
GYLPPLCDPKDGHLLMDGGYINNLPDMAEIQSRLAYVSCVRQLEVVKSSS

SEQ ID NO: 1582 - protein, 50 aa, Homo sapiens
LKIMPVQKQTRAGQRTRFKAFVAIGKPHTVPCKVTGRCGSVLVRLIPAPR

SEQ ID NO: 1583 - protein, 50 aa, Homo sapiens
DEVLKIMPVQKQTRAGQRTRFKAFVAIGKPHTVPCKPRPPLMPFLRPTAT

SEQ ID NO: 1584 - protein, 50 aa, Homo sapiens
GASLRKMVKKIEISQHAKYTCSFCGRAVGIWHCGSCMKTVAGGAWTYNRM

SEQ ID NO: 1585 - protein, 50 aa, Homo sapiens
AACFHGATCHDRVASFYCECPHGRTGANPCEHAGKCINTLGSFECQCLQG

SEQ ID NO: 1586 - protein, 50 aa, Homo sapiens
RNGANCTDCVDSYTCTCPAGFSGIHSPASTVAPAWTASTRSPACVHPASR

SEQ ID NO: 1587 - protein, 50 aa, Homo sapiens
SPASTVAPAWTASTRSPACVHPASRAATASTMSMSATHSPACMAAPVRTA

SEQ ID NO: 1588 - protein, 50 aa, Homo sapiens
AATASTMSMSATHSPACMAAPVRTAAAPTGAPAPRATLAPTARTLCTGVT

SEQ ID NO: 1589 - protein, 50 aa, Homo sapiens
AAPTGAPAPRATLAPTARTLCTGVTPRPARTAANAGRPTPSTAASAPAAG

SEQ ID NO: 1590 - protein, 50 aa, Homo sapiens
PRPARTAANAGRPTPSTAASAPAAGPAFTATCPACPVRWLRSDKVLTLPA

SEQ ID NO: 1591 - protein, 50 aa, Homo sapiens
PAFTATCPACPVRWLRSDKVLTLPACASMEGSVWTRATRTTAAARRATQA

SEQ ID NO: 1592 - protein, 50 aa, Homo sapiens
CASMEGSVWTRATRTTAAARRATQAATVRTWWTSAHPAPARTGPPARTTW

SEQ ID NO: 1593 - protein, 50 aa, Homo sapiens
RTTAAARRATQAATVRTWWTSAHPAPARTGPPARTTWAATPASAWPATTG

SEQ ID NO: 1594 - protein, 50 aa, Homo sapiens
GGGGGGGGGGGGGGGGGGGGGMPALRPALLWALLALWLCCAAPAHVSRWL

SEQ ID NO: 1595 - protein, 50 aa, Homo sapiens
ASCTPGSTCIDRVASFSCMCPEGKAANSNPCEHAGKCVNTDGAFHCECLK

SEQ ID NO: 1596 - protein, 50 aa, Homo sapiens
AGLGRQPPGGCVLSLGLLNPVAVPLVPAATGAGTPAAQPRDPRLPAGAAP

SEQ ID NO: 1597 - protein, 50 aa, Homo sapiens
VPAATGAGTPAAQPRDPRLPAGAAPALPGSPRTWRGVPGGWGTQQPPKGP

SEQ ID NO: 1598 - protein, 50 aa, Homo sapiens
AGTPAAQPRDPRLPAGAAPALPGSPRTWRGVPGGWGTQQPPKGPLPAGSQ

SEQ ID NO: 1599 - protein, 50 aa, Homo sapiens
FRALVAQCLVCVPWDARPPPAAPSFRQGLAVFRPQSTVCVRRSWPSSCTG

SEQ ID NO: 1600 - protein, 50 aa, Homo sapiens
YCVRRYAVVQKAAHGHVRKAFKSHVLRPVPGDPAGLHPLHAALQPVLRRH

SEQ ID NO: 1601 - protein, 50 aa, Homo sapiens
AFKSHVLRPVPGDPAGLHPLHAALQPVLRRHGEQAVCGDSAGRAAPAFGG

SEQ ID NO: 1602 - protein, 50 aa, Homo sapiens
YTHLGSGPTVASIRELMEERYGEKGKAIRIEKVIYTGKEGKSSRGCPIAK

SEQ ID NO: 1603 - protein, 50 aa, Homo sapiens
MWTLRATGREVPYETLNKRFRAAQKNIDRETSHVTMVVAELEKTLSGCPA

SEQ ID NO: 1604 - protein, 50 aa, Homo sapiens
DLLAKLEAKTGVNRSFIALGVIGLVALYLVFGYGASLLCNLIGFGYPAYI

SEQ ID NO: 1605 - protein, 50 aa, Homo sapiens
GVNRSFIALGVIGLVALYLVFGYGASLLCNLIGFGYPAYISEESYREFTG

SEQ ID NO: 1606 - protein, 50 aa, Homo sapiens
LEAKTGVNRSFIALGVIGLVALYLVFGYGASLLCNLIGFGYPAYISEESY

SEQ ID NO: 1607 - protein, 50 aa, Homo sapiens
EAAIADAEQRGELAIKDANAKLSELALDIEIATYRKLLEGEESRLESGMQ

SEQ ID NO: 1608 - protein, 50 aa, Homo sapiens
DQLLAEEKNISSKYADERDRAEAEAKEELERTNKMLKAEMEDLVSSKDDV

SEQ ID NO: 1609 - protein, 50 aa, Homo sapiens
ATTPQAKGFRRAVSELDAKQAEAIMSPRFIGRRQSLIEDARKEREAAVAA

SEQ ID NO: 1610 - protein, 50 aa, Homo sapiens
GGGGGGMPTPDATTPQAKGFRRAVSELDAKQAEAIMGHQALGAVPSCEGV

SEQ ID NO: 1611 - protein, 50 aa, Homo sapiens
ATTPQAKGFRRAVSELDAKQAEAIMGAPGPSLTGSPWPGTAAPAASYTPT

SEQ ID NO: 1612 - protein, 50 aa, Homo sapiens
DSSAQFGYYFRVTCKEEKVLRNNKNFSTVDIQKNGVKFTNRLCRTNADTQ

SEQ ID NO: 1613 - protein, 50 aa, Homo sapiens
PKSYGFNAARLANLPEEVIQKGHRKAREFEKMNQSLRLFRKFAWLVKGQL

SEQ ID NO: 1614 - protein, 50 aa, Homo sapiens
APGASPSPGGDAAWSEAGPGPRPLARSASPPKAKNLNGGLRRSVAPAAPT

SEQ ID NO: 1615 - protein, 50 aa, Homo sapiens
PGASPSPGGDAAWSEAGPGPRPLARSASPPKAKNLNGGLRRSVAPAAPTR

SEQ ID NO: 1616 - protein, 50 aa, Homo sapiens
AFVGHRDSMDLQRFKETSNKIKILSDWLQDRPSNREMPSEEGTLNGLTSP

SEQ ID NO: 1617 - protein, 50 aa, Homo sapiens
EQKQIRIQEAKIIEEKAAKIKEWVTLELENQNLRLINQNQTEEIRTMQSK

SEQ ID NO: 1618 - protein, 50 aa, Homo sapiens
GRRRGEDMMHPLKVSLEDLYNGKTTKLQLSKNVLCSACSGYFREMGMICT

SEQ ID NO: 1619 - protein, 50 aa, Homo sapiens
NKLIKYIQIKFVRGSTFKEIPVTVYRPTLTKVKIEGEPEFRLIKEGETIT

SEQ ID NO: 1620 - protein, 50 aa, Homo sapiens
NIKNVAKTANKDHLVTAYNHLFETKGPPKYTKSVLKKGDKTNFPKKGDVV

SEQ ID NO: 1621 - protein, 50 aa, Homo sapiens
GPRRGMDDDRGPRRGMDDDRGPRRGAEDDRGPWRNMDDDRLSRRADDDRF

SEQ ID NO: 1622 - protein, 50 aa, Homo sapiens
LHTHGDKQDKVKQKAFVEPYFKGDESLQNFPHIEVVRKKEERRKLLGHTC

SEQ ID NO: 1623 - protein, 50 aa, Homo sapiens
GGGGGGGGGGGGGGGGGGGGGGGMDRSKENCISGPVKEDHSLWHPGLPAP

SEQ ID NO: 1624 - protein, 50 aa, Homo sapiens
PLPSAPENNPEEELASKQKNEESKKQWALEDFEIGRPLGKGKFGNVYLAR

SEQ ID NO: 1625 - protein, 50 aa, Homo sapiens
TSVPHPVSRPLNNTQKSKQPLPSAPGGSGLWKTLKLVALWVKESLVMFIW

SEQ ID NO: 1626 - protein, 50 aa, Homo sapiens
GGSGLWKTLKLVALWVKESLVMFIWQEKSKASLFWLLKCYLKLSWRKPEW

SEQ ID NO: 1627 - protein, 50 aa, Homo sapiens
TLKLVALWVKESLVMFIWQEKSKASLFWLLKCYLKLSWRKPEWSISSEEK

SEQ ID NO: 1628 - protein, 50 aa, Homo sapiens
TRHFTIDDFEIGRPLGKGKFGNVYLAREKKSHFIVALKPSQHPASLQLFL

SEQ ID NO: 1629 - protein, 50 aa, Homo sapiens
DLRNTKHEISEMNRMIQRLRAEIDNVKKQWLWRWPRWRSWRRPRWRSCRR

SEQ ID NO: 1630 - protein, 50 aa, Homo sapiens
EEEIYKDRDSQITAIEKTFEDAQKSSHSITANPESHRWRSCLSSQTLRCG

SEQ ID NO: 1631 - protein, 50 aa, Homo sapiens
DRDSQITAIEKTFEDAQKSSHSITANPESHRWRSCLSSQTLRCGSIHVLR

SEQ ID NO: 1632 - protein, 50 aa, Homo sapiens
LLSQNQGGKTFIVGDQISFADYNLLSAYVGRLSARPKLKAFLASPEYVNL

SEQ ID NO: 1633 - protein, 50 aa, Homo sapiens
VEDLRCKYISLIYTNYISFADYNLLSAYVGRLSARPKLKAFLASPEYVNL

SEQ ID NO: 1634 - protein, 50 aa, Homo sapiens
CVLDLTAMRGGNPELCTSAVSLYQIQESVVVDQISQLSKDWGCQESERTI

SEQ ID NO: 1635 - protein, 50 aa, Homo sapiens
GGGGGGGGGGGGGGGGGGGGGGGGGGGGMAQKENSYPWPYGRQTLPLARR

SEQ ID NO: 1636 - protein, 50 aa, Homo sapiens
LDVRDAWGRLPVDLAEELGHRDVARYLRAAAGGTRGSNHARIDAAEDIPD

SEQ ID NO: 1637 - protein, 50 aa, Homo sapiens
NKGMPSGGGSDEGLASAAARGLVEKVMMMGSARVAELLLLHGAEPNCADP

SEQ ID NO: 1638 - protein, 50 aa, Homo sapiens
ALKRKPDLFLCERLDVKAVFQCAVLALKFPEAPTVKASCGFFSCCLGVGK

SEQ ID NO: 1639 - protein, 50 aa, Homo sapiens
PLGRGQYREAAAGGEAAPVAAPAAGGLRAGQQLQLGGSREGGGCLHATVV

SEQ ID NO: 1640 - protein, 50 aa, Homo sapiens
TTGMQQATAYATYPQPGQPYGISSYGSSFTTSSGIYTGNNSLTNSSGFNS

SEQ ID NO: 1641 - protein, 50 aa, Homo sapiens
TAGYNAMEESVSREKPELTASTERVNKRMSMVVSGLTPEEFMLSLCVNGH

SEQ ID NO: 1642 - protein, 50 aa, Homo sapiens
EVRGDVVNGRNHQGPKRARESQDRKGARNLLLWALHQHAHRSTGMDGTAV

SEQ ID NO: 1643 - protein, 50 aa, Homo sapiens
GARNLLLWALHQHAHRSTGMDGTAVWCFCGEGAFIIHPWHRCPPNCGCAA

SEQ ID NO: 1644 - protein, 50 aa, Homo sapiens
STGMDGTAVWCFCGEGAFIIHPWHRCPPNCGCAARCLDRGQWLPCNWADV

SEQ ID NO: 1645 - protein, 50 aa, Homo sapiens
QGLSRDVTTVWKLRIVSYSKKEKDSEGKRYRIYHLATSKSKSKSERANIQ

SEQ ID NO: 1646 - protein, 50 aa, Homo sapiens
GIQLADGGWLIPSNDGKAGKEEFYRFLLTVLGLLAGIPNLDSFLTLDLFL

SEQ ID NO: 1647 - protein, 50 aa, Homo sapiens
AGKEEFYRFLLTVLGLLAGIPNLDSFLTLDLFLCPYHRFSVMEEMLVVLM

SEQ ID NO: 1648 - protein, 50 aa, Homo sapiens
SLDLTTTCVSSSAPSKTSLIMNPHASTNGQLSVHTPKRESLQKTKNACKP

SEQ ID NO: 1649 - protein, 50 aa, Homo sapiens
IINAEAEVEATQMTYFNGSTNHGLEIDESVNGHEINERKEKTKPVPGTCK

SEQ ID NO: 1650 - protein, 50 aa, Homo sapiens
IINAEAEVEATQMTYFNGSTNHGLEIDESVNGHEINERKEKTKPVPGTQA

SEQ ID NO: 1651 - protein, 50 aa, Homo sapiens
KDFDREVEIRIKQIESDRQNLLKEVDNLYNIEILRLPKALREMNWLDYFG

SEQ ID NO: 1652 - protein, 50 aa, Homo sapiens
EVGRCKETGKVHVTVDLKYYRPTEVGDCTKAKQKLNWKPRVAFDELVREM

SEQ ID NO: 1653 - protein, 50 aa, Homo sapiens
ASSSTHHPITTYPPYVPEYSSGLFPPSSLLGGSPTGFGCKSRPKARSSTD

SEQ ID NO: 1654 - protein, 50 aa, Homo sapiens
GGGGGGGGGGGGGGGGGGGGGGGGGGGGMAEEQPQVELFVKVPQAGSSEP

SEQ ID NO: 1655 - protein, 50 aa, Homo sapiens
VLCIWVQQNVPSGTDTGDPQSKPLGDWAAGTMDPESSIFIEDAIKYFKEK

SEQ ID NO: 1656 - protein, 50 aa, Homo sapiens
CIWMSALFLGVGVRAEEAGARVQQNVPSGTDTGDPQSKPLGDWAAGTMDP

SEQ ID NO: 1657 - protein, 50 aa, Homo sapiens
EAGARVQQNVPSGTDTGDPQSKPLGDWAAGTMDPESSIFIEDAIKYFKEK

SEQ ID NO: 1658 - protein, 50 aa, Homo sapiens
EIELKNRHGLVPFAFVRFEDPRDAEDAIYGRNGYDYGQCRLRVEFPRTYG

SEQ ID NO: 1659 - protein, 50 aa, Homo sapiens
DAIYGRNGYDYGQCRLRVEFPRTYGGSWQDLKDHMREAGDVCYADVQKDG

SEQ ID NO: 1660 - protein, 50 aa, Homo sapiens
CPGHDILMATMLNGAAVMDAALLLIGTVAEGAPIIPISAQLKYNIEVVCE

SEQ ID NO: 1661 - protein, 50 aa, Homo sapiens
QRFSSAVGLVTIVECCPVLLGPPLLEQKANEQKKESKEEETSIDVAGKPN

SEQ ID NO: 1662 - protein, 50 aa, Homo sapiens
AILLYKVACNMMMKKNQNKKHYGTIRTLLLNCLKLLDKSRHPQLCISSLP

SEQ ID NO: 1663 - protein, 50 aa, Homo sapiens
KKHYGTIRTLLLNCLKLLDKSRHPQPSCAFPVCHDTEERCRLVLSYVLEG

SEQ ID NO: 1664 - protein, 50 aa, Homo sapiens
SSSYRGSFGLALKVQEVPASAQSRPVRTAMTSSDTSSSSRLPKECISKEQ

SEQ ID NO: 1665 - protein, 50 aa, Homo sapiens
VRTAMTSSDTSSSSRLPKECISKEQMRSPTLGASLPSCASIPSWPWPCPA

SEQ ID NO: 1666 - protein, 50 aa, Homo sapiens
MRSPTLGASLPSCASIPSWPWPCPANSPSHRENWEVQMGPRTLQTAQPPA

SEQ ID NO: 1667 - protein, 50 aa, Homo sapiens
SCASIPSWPWPCPANSPSHRENWEVQMGPRTLQTAQPPARRNLRAATPCT

SEQ ID NO: 1668 - protein, 50 aa, Homo sapiens
SPQQLQVLLQQQQALMLQQQQLQEFYKKQQEQLQLQLLQQQHAGKQPKEA

SEQ ID NO: 1669 - protein, 50 aa, Homo sapiens
IGAADLAHAQQQQQQALQVARQLLLQQQQQQQVSGLKSPKRNDKQPALQA

SEQ ID NO: 1670 - protein, 50 aa, Homo sapiens
QAILESPEKQLTLNEIYNWFTRMFAYFRRNAATWKASCTRQRRAPRSRGS

SEQ ID NO: 1671 - protein, 50 aa, Homo sapiens
EFQKRRPQKISGNPSLIKNMQSSHAYCTPLNAALQASCTRQRRAPRSRGS

SEQ ID NO: 1672 - protein, 50 aa, Homo sapiens
NAEVRPPFTYASLIRQAILESPEKQLTLNEIYNWFTRMFAYFRRNAATWK

SEQ ID NO: 1673 - protein, 50 aa, Homo sapiens
FYKKQQEQLQLQLLQQQHAGKQPKEQVATQQLAFQQQLLQMQQLQQQHLL

SEQ ID NO: 1674 - protein, 50 aa, Homo sapiens
LLQQQQQQQVSGLKSPKRNDKQPALQQVATQQLAFQQQLLQMQQLQQQHL

SEQ ID NO: 1675 - protein, 50 aa, Homo sapiens
FYKKQQEQLQLQLLQQQHAGKQPKERQGLLTIQPGQPALPLQPLAQGMIP

SEQ ID NO: 1676 - protein, 50 aa, Homo sapiens
LLLQQQQQQQVSGLKSPKRNDKQPALQRQGLLTIQPGQPALPLQPLAQGM

SEQ ID NO: 1677 - protein, 50 aa, Homo sapiens
LQQQQQQQVSGLKSPKRNDKQPALQQQQVATQQLAFQQQLLQMQQLQQQH

SEQ ID NO: 1678 - protein, 50 aa, Homo sapiens
AADLAHAQQQQQQALQVARQLLLQQQQQQQVSGLKSPKRNDKQPALQFVP

SEQ ID NO: 1679 - protein, 50 aa, Homo sapiens
TVRAPFAKLFIFSALQVARQLLLQQQQQQQVSGLKSPKRNDKQPALQFVP

SEQ ID NO: 1680 - protein, 50 aa, Homo sapiens
LQQQVLSPQQLQVLLQQQQALMLQQQQQVATQQLAFQQQLLQMQQLQQQH

SEQ ID NO: 1681 - protein, 50 aa, Homo sapiens
QAILESPEKQLTLNEIYNWFTRMFAYFRRNAATWKGAIRTNLSLHKCFIR

SEQ ID NO: 1682 - protein, 50 aa, Homo sapiens
QILQQQVLSPQQLQVLLQQQQALMLQQLQEFYKKQQEQLQLQLLQQQHAG

SEQ ID NO: 1683 - protein, 50 aa, Homo sapiens
PLTPVTQGPSVITTTSMHTVGPIRRRYSDKYNVPISSGHSRISRKAANTK

SEQ ID NO: 1684 - protein, 50 aa, Homo sapiens
RQTVRAPFAKLFIFSALQVARQLLLQQQQQQQVSGLKSPKRNDKQPALQA

SEQ ID NO: 1685 - protein, 50 aa, Homo sapiens
ILQQQVLSPQQLQALLQQQQAVMLQQLLQQQQQQQQQQQQQQQQQQQQQQ

SEQ ID NO: 1686 - protein, 50 aa, Homo sapiens
QQILQQQVLSPQQLQALLQQQQAVMLQQQQQQQQQQQQQQQQQQQQQQQQ

SEQ ID NO: 1687 - protein, 50 aa, Homo sapiens
QQAVMLQQDFLDSGLENFRAALEKNQQQQQQQQQQQQQQQQQQQQQQQQQ

SEQ ID NO: 1688 - protein, 50 aa, Homo sapiens
QILQQQVLSPQQLQALLQQQQAVMLQQQQQQQQQQQQQQQQQQQQQQQQQ

SEQ ID NO: 1689 - protein, 50 aa, Homo sapiens
QQAVMLQQDFLDSGLENFRAALEKNLLQQQQQQQQQQQQQQQQQQQQQQQ

SEQ ID NO: 1690 - protein, 50 aa, Homo sapiens
SGDTSSEVSTVELLHLQQQQALQAARQLLLQQQTSGLKSPKSSDKQRPLQ

SEQ ID NO: 1691 - protein, 50 aa, Homo sapiens
ILQQQVLSPQQLQALLQQQQAVMLQQQQQQQQQQQQQQQQQQQQQQQQQQ

SEQ ID NO: 1692 - protein, 50 aa, Homo sapiens
EIEADLERQEKEVDEDTTVTIPSAVYVAQLYHQVSKIEWDYECEPGMVKG

SEQ ID NO: 1693 - protein, 50 aa, Homo sapiens
EEVHVNETLFIIVFGESLLNDAVTVGLTIKPLVKWLKVKRSEHHKPTLNQ

SEQ ID NO: 1694 - protein, 50 aa, Homo sapiens
HGPFTGIACGKSMMSSVSLMGGRGGVPLYDRNHVTGASSSSSSSTKATLS

SEQ ID NO: 1695 - protein, 50 aa, Homo sapiens
VYSWGKGARGRLGRRDEDAGLPRPVQLDETHPYTVTSVSCCHGNTLLAVR

SEQ ID NO: 1696 - protein, 50 aa, Homo sapiens
GGGGGGGGGGGGGGGGGGGGGGMASRQPEVPGGGRRGQSTLPCHDPVISH

SEQ ID NO: 1697 - protein, 50 aa, Homo sapiens
MPLCTHGGGTPRVPQGREGAWPADLACGEVRSGARAHQPLWRLLHGRRLR

SEQ ID NO: 1698 - protein, 50 aa, Homo sapiens
QGREGAWPADLACGEVRSGARAHQPLWRLLHGRRLRHPEDSAAEERKSAV

SEQ ID NO: 1699 - protein, 50 aa, Homo sapiens
QAASQEGRQKHAKNNSQAKPSACDGFPCVSGPTARDLYGFQKVPGVLSVQ

SEQ ID NO: 1700 - protein, 50 aa, Homo sapiens
KNNSQAKPSACDGFPCVSGPTARDLYGFQKVPGVLSVQSEKAPHGPASPG

SEQ ID NO: 1701 - protein, 50 aa, Homo sapiens
KQAASQEGRQKHAKNNSQAKPSACDGFPCVSGPTARDLYGFQKVPGVLSV

SEQ ID NO: 1702 - protein, 50 aa, Homo sapiens
ASLNKALSSSADDASLVNASISSSVEEQELSLSWNALESVVKNIAKKVQL

SEQ ID NO: 1703 - protein, 50 aa, Homo sapiens
EEQELSLSWNALESVVKNIAKKVQLVAHPTEPPLLLQIQRPSKKDYSSKT

SEQ ID NO: 1704 - protein, 50 aa, Homo sapiens
SWNALESVVKNIAKKVQLVAHPTEPPLLLQIQRPSKKDYSSKTHLHLLPI

SEQ ID NO: 1705 - protein, 50 aa, Homo sapiens
GGGGGGGGGGGGGGGGGGGGGGGGMGQRPDFCTRRLGALFLSHGTWVLAE

SEQ ID NO: 1706 - protein, 50 aa, Homo sapiens
HGLICEGQPVTSRLAVICGTSSCHMGQRPDFCTRRLGALFLSHGTWVLAE

SEQ ID NO: 1707 - protein, 50 aa, Homo sapiens
DLQKLKDELASTKQKLEKAENQVLAMRKQSEGLTKEYDRLLEEHAKLQEE

SEQ ID NO: 1708 - protein, 50 aa, Homo sapiens
EAERNKGPGQRAPERLESLLEKRKEHREVRLKCVKALKGLYGNRDLTTRL

SEQ ID NO: 1709 - protein, 50 aa, Homo sapiens
PKPPKPVSKMRMATPLLMQALPMGALPQGPMQNATKYGNMTEDHVMHLLQ

SEQ ID NO: 1710 - protein, 50 aa, Homo sapiens
YEEKEVDLSDIINTPLPRVPLDVCLKGKEKKAPPLLEGAPLRLKPRSIHE

SEQ ID NO: 1711 - protein, 50 aa, Homo sapiens
KRQKLTTSDIDYALKLKNVEPLYGFHAQEFIPFRFASGGGRELYFYEEKE

SEQ ID NO: 1712 - protein, 50 aa, Homo sapiens
MADGELNVDSLITRLLEGKRRFNIKLWKTFTDCFNCLPIAAIVDEKIFCC

SEQ ID NO: 1713 - protein, 50 aa, Homo sapiens
LRIHENKVKKIQKDTFKGMNALHVLGLPPTLLELHLDYNKISTVELEDFK

SEQ ID NO: 1714 - protein, 50 aa, Homo sapiens
LSHNQLSEIPLNLPKSLAELRIHENKVKKIQKDTFKGMNALHVLDNLPSF

SEQ ID NO: 1715 - protein, 50 aa, Homo sapiens
EEEDDKDDKDSEKKGFINKIYAIQEYFQLDCPILKLAGHCSPLCVHSHPV

SEQ ID NO: 1716 - protein, 50 aa, Homo sapiens
GFINKIYAIQEYFQLDCPILKLAGHCSPLCVHSHPVLHSAEIHCPCLGHQ

SEQ ID NO: 1717 - protein, 50 aa, Homo sapiens
GGGGGGGGGGGGGGGGGGGGGGGGGGGMVALRGLGSGLQPWCPLDLRLGS

SEQ ID NO: 1718 - protein, 50 aa, Homo sapiens
KKKKSGTKKDVPKSWLMKALFKTFYMVLLKSFLLKLVNDIFTFIADLLCK

SEQ ID NO: 1719 - protein, 50 aa, Homo sapiens
LMVIIRYISRVLVWILTILVILGSLGTGVLWWLYAKQRRSPKETVTPEQL

SEQ ID NO: 1720 - protein, 50 aa, Homo sapiens
CKEVDYRSDRREDYYDIQLSIKGKKNRSRERCEIPNIATSVTSTTDEIYV

SEQ ID NO: 1721 - protein, 50 aa, Homo sapiens
DSLVLVGKVPLCFVEREANELRRGRSTVTKSIVEEFIREQLEGPLSLMMA

SEQ ID NO: 1722 - protein, 50 aa, Homo sapiens
EFVFPDTSDSLVLVGKVPLCFVEREANELRRGRSTVTKSIVEGPLSLMMA

SEQ ID NO: 1723 - protein, 50 aa, Homo sapiens
MEGSEEKELTLTATSVPSFINHPLDHVTREKLDRILAVIQGSHQKALVMY

SEQ ID NO: 1724 - protein, 50 aa, Homo sapiens
PMEGSEEKELTLTATSVPSFINHPLDHVTREKLDRILAVIQGSHQKALVM

SEQ ID NO: 1725 - protein, 50 aa, Homo sapiens
KSRQPLWGLKEMEEEDGSELDFAQGLSLMEEDEEEELEIQDESNEERQDT

SEQ ID NO: 1726 - protein, 50 aa, Homo sapiens
QDPIWLLMADADSSVMMTYQLPSRNVFTVKTRKKVIFAYHMRKIFLLWDS

SEQ ID NO: 1727 - protein, 50 aa, Homo sapiens
VMMTYQLPSRNVFTVKTRKKVIFAYHMRKIFLLWDSAKCRTPKKTKMDPP

SEQ ID NO: 1728 - protein, 50 aa, Homo sapiens
LCSAARRKQHCLGTRIITKNFSVNLSVCLLQLPVCPLWYLWKPVVGKSLL

SEQ ID NO: 1729 - protein, 50 aa, Homo sapiens
NCQVYGRNALNLKGFFILNCPDLTPLAFQLIYLNLSFNDLHYFPTEHIQV

SEQ ID NO: 1730 - protein, 50 aa, Homo sapiens
PEPRKNRPPIAIVSPQFQEISLPTTSTVIDGSPLMMIKSFSTIGKNLRGL

SEQ ID NO: 1731 - protein, 50 aa, Homo sapiens
SEDIIKFSKFPAAQAPDPSETPKIETDHWPGPPSFAVVDLVAERKMMRNF

SEQ ID NO: 1732 - protein, 50 aa, Homo sapiens
YARAFNTDHQTQLLYQASAMMVESRTDYSGRGELSARQMHLARFLRMLLR

SEQ ID NO: 1733 - protein, 50 aa, Homo sapiens
RRRRHSPSRSASPSPRKRQKETSPRTPSPPPRRRSPSPRRYSPPIQRRYS

SEQ ID NO: 1734 - protein, 50 aa, Homo sapiens
RDSSHKVLSNVNLPADLDLVCNAEWGPGPCSRTPSECYGCAAWTSWTRAV

SEQ ID NO: 1735 - protein, 50 aa, Homo sapiens
GGGGGGGGGGGGGGGGGMSSIGTGYDLSASTFSPDGRVFQVEYAMKAVEN

SEQ ID NO: 1736 - protein, 50 aa, Homo sapiens
DLSASTFSPDGRVFQVEYAMKAVENSSSRFVGRCSFFSRHSKRRSFQLQI

SEQ ID NO: 1737 - protein, 50 aa, Homo sapiens
GGGGGGGGGGGGGGGGMSSIGTGYDLSASTFSPDGRVFQVEYAMKAVENS

SEQ ID NO: 1738 - protein, 50 aa, Homo sapiens
EPKAVRTTTRYAIRCGPKQFTSYLTALLEQGNKLRNAMVISAMKSSPETS

SEQ ID NO: 1739 - protein, 50 aa, Homo sapiens
RDIGTQTVGLFYPSGKLLAKKEQELASQKQRQEKMSDHKPLLTAISPGRA

SEQ ID NO: 1740 - protein, 50 aa, Homo sapiens
KRDIGTQTVGLFYPSGKLLAKKEQELASQKQRQEKMSDHKPLLTAISPGR

SEQ ID NO: 1741 - protein, 50 aa, Homo sapiens
WPKTMTGLPSTSGTTASVVIIRGMKIVMNKSGVNRVVWKRPRLTHNGPVR

SEQ ID NO: 1742 - protein, 50 aa, Homo sapiens
QDALVLEDVEKEKKEVWDQKRCSKILVDEGSVQNFLHGAPEIIPTEASEG

SEQ ID NO: 1743 - protein, 50 aa, Homo sapiens
SPTVAHESNWVTPAGVGQVGEPRLGFREARAMRPPGVSKATWAAARRFGR

SEQ ID NO: 1744 - protein, 50 aa, Homo sapiens
RNWQKSSSEDKKHAAKFGKFSGKDDVSSFKAALLSGPPGVGKTTTASLVC

SEQ ID NO: 1745 - protein, 50 aa, Homo sapiens
GRPSGSTPLGPLARVPPTAAVAQVFQRGNMNSEPEEEDGGLEDEDGDDEV

SEQ ID NO: 1746 - protein, 50 aa, Homo sapiens
SLDGAAVDSADRSPRPTSAPAITQGQVAEGGVLDASAKKQWSLKHRRKQG

SEQ ID NO: 1747 - protein, 50 aa, Homo sapiens
LPGDALDQKGFLALLGLQHTKDVRPAPAEEPLPDDNQAIQLQTLKCQLPG

SEQ ID NO: 1748 - protein, 50 aa, Homo sapiens
KDSGKAKAKAVSRSQRAGLQFPVGRIHRHLKTRTTSHGRVGATAAVYSAL

SEQ ID NO: 1749 - protein, 50 aa, Homo sapiens
FRDNFDKRSCHYEHGGYERPPSHCQENDGSVEMRDVHKDQQLRHTPYSIG

SEQ ID NO: 1750 - protein, 50 aa, Homo sapiens
QKPQRPRRPASPISTIQPKANFDAQQGHRAEATTLHVAPQGTAMAVSTFR

SEQ ID NO: 1751 - protein, 50 aa, Homo sapiens
SILELNELGEYAAVELHQAKDVNTGGIFQLRQSTSHGETCAAFRDTATYG

SEQ ID NO: 1752 - protein, 50 aa, Homo sapiens; identical to SEQ ID NO: 692

SEQ ID NO: 1753 - protein, 50 aa, Homo sapiens
FEGSPARELDVPLPDIDYMEIPVDWWDAEADKSLLIGVFKHGYERYNAMG

SEQ ID NO: 1754 - protein, 50 aa, Homo sapiens
TPPVVKRLLGWKKSAGGSGGAGGGEQNGQEEKWCEKAVKSLVKKLKKTGG

SEQ ID NO: 1755 - protein, 50 aa, Homo sapiens
YVTSTVPSMLANFLSDTKIISFSGCFLQFYFFFSLGSTECFFLAVMAFDG

1. A method for detecting an antibody repertoire, comprising:
(a) contacting a sample from a subject with a peptide display library under conditions sufficient to permit binding of an antibody from said sample to a non-wild type antigen within said peptide display library to yield a complex comprising said non-wild type antigen coupled to said antibody;
(b) identifying said non-wild type antigen; and
(c) using said non-wild type antigen identified in (b) to identify said antibody.

2. The method of claim 1, wherein said non-wild type antigen comprises a nucleic acid barcode sequence specific to said non-wild type antigen.

3. The method of claim 2, wherein said nucleic acid barcode sequence uniquely identifies said non-wild type antigen.

4. The method of any one of claims 2 or 3, further comprising subjecting said complex to nucleic acid amplification under conditions sufficient to amplify said nucleic acid barcode sequence to yield an amplified complex comprising a sequence that is homologous or complementary to said nucleic acid barcode sequence.

5. The method of claim 4, further comprising determining said sequence of said amplified complex.

6. The method of claim 5, further comprising using said sequence of said amplified complex to generate said antibody repertoire.

7. The method of claim 1, wherein said peptide display library further comprises a wild type epitope of an antibody.

8. The method of claim 1, wherein said non-wild type antigen is selected from a peptide variant of a wild-type protein selected from the group consisting of a somatic single amino acid substitution variant, insertion-deletion variant, structural variant, and frameshifted protein sequence induced downstream of a missense mutation.

9. The method of claim 1, wherein said subject has been treated with a therapeutic prior to (a).

10. The method of claim 1, wherein said therapeutic is a cancer therapeutic.

11. The method of claim 10, wherein said therapeutic is an immunotherapy.

12. The method of claim 1, wherein said subject has received treatment selected from the group consisting of a PD-1 inhibitor, a PD-L1 inhibitor, and a CTLA-4 inhibitor.

13. The method of claim 1, wherein said subject has received treatment, wherein said treatment comprises Tumor-Associated Antigen (TAA)-targeted therapy, a SEREX antigen-targeted therapy, a Neoantigen-targeted therapy, or a biologic or small molecule therapy targeted against CD19, HER2, STAT3, IDO, NY-ESO-1, CD40, CSF1R, BCMA, MUC1, ADORA2A, CD20, GD2, TLR7, WT1, IFNAR1, CD47, EGFR, LAG-3, OX40, PSMA, Mesothelin, TERT, TLR, TLR9, 4-1BB, IL2R, TLR4, CD33, GITR, HPV E6, Survivin, CD123, TIGIT, TIM-3, CD73, HPV E7, TLR3, CD38, EBV, STING, CD22, GPC3, HDAC1, CXCR4, GMCSFR, CD30, CEACAM5, HDAC6, HPV, CD3, MAGE-A3, TNF, PSA, CD25, CEA, EPCAM, CMV, IL12, PRAME, IL12R, 5T4, Beta Catenin, CCR2, PMEL, CXCL12, IGF1, CD46, CXCR1, GMCSF, IL15R, ROR1, TGFBR2, CCR4, FLT-3, FOLR1, GCSFR, ICOS, JAK2, KRAS, VISTA, CD133, CD27, CD39, CEACAM6, NKG2D, STAT5, TGFB1, TLR2, USP7, ANG1, ANG2, B7-H3, CLEC12A, IL13RA2, RIG-1, TRP2, VEGF, AFP, Alpha-Gal, COX-2, EPHA2, gp96, MUC16, p53, TGF-β, CD138, CDw136, CS1, CXCR2, EGFRvIII, E3 Ligase, Ubiquitin Ligase, Gelactin-3, Globo H, GR, IFNAR2, IFNGR1, IL6, JAK1, MLANA, RAS, SLAMF7, TDO, TGFB2, TLR8, ALK, Arginase, CCR1, CD56, CD70, FAP, GD3, IDH1, IL6R, IRAK4, MAGE-A4, MERTK, MIF, PSCA, PTGER4, SIRPA, TGFB, TGFBR1, ACPP, ADORA2B, AR, Brachyury, CA19-9, CD32, CEACAM1, Gastrin, HDAC, HPV L2, IFNAR, IFNGR, IGF1R, IGF2, IL15, IL17R, IL1B, IL7R, JAK, MAGE-A, MAGE-A1, MAGE-A6, P38, RORC, TLR5, VEGFR2, ADORA3, ATRT, B7-H4, c-KIT, CCR7, CD11b, CD135, CD171, CD174, CDH3, CX3CR1, Gelactin-1, GM3, HLA-A2, HSP70, IL10, IL17, IL2RB, JAK3, MDA5, NKG2A, PBF, PVRIG, SPAM1, URLC10, VEGFR1, ABCB5, ADABP, ADAM17, ADP, AEG1, Alpha-lactalbumin, AMHR2, Angiogenesis, ASPH, AXL, BCL2, BTE6-LX-8b, BTE6-X-15-7, Carbohydrate Antigen, CCL20, CCL3, CCNB1, CD147, CD155, CD16, CD162, CD16a, CD200, CD21, CD28, CD44, CD52, CD54, CD7, CD80, CD88, Claudin 18, cMET, COX2, CSF1, CTCFL, CXCR5, CXCR7, ElA, EIF2AK3, ERG, FGF2, FN1, GC, GM2, gpA33, HBV, Hemagglutinin, HER3, HILPDA, HLA-DR, HMW-MAA, HP59, HPV 16, HPV E6/7, HPV L1, HSP105, HSP65, HVEM, Hyaluronan, IL13RA1, IL2, IL21R, ILDR2, IL8, KIF20A, KIR2DL1, KIR2DL3, LXR, MAGE-A10, MAGE-C2, Mammaglobin A, MAPK, MICA, MiHA, MMP-11, MVP, Myeloblastin, N-Myc, NKp46, NLRP3, NR2F6, Oncofetal Antigen, P2RX7, RhoC, SIM-2, SSTR2, SSX2, STAT1, STn, TAG72, TAMA, TFDP3, TGFBR, TSA, TYK2, Tyrosinase, VEGFA, Ecto 5′ Nucleotidase, CD73, NT5E, ADAM9, Adenosine, AIM2, B7-H6, BAFF-R, BAI1, BARD1, BOB-1, CA9, Cancer Testis Antigen (CTA), CB2, CBLB, CCR9, CD13, CD130, CD150, CD160, CD200R1, CD267, CD29, CD3E, CD4, CD51, CD8, Claudin 6, CLEC2D, COX, COX-1, CPEB4, CPEG4, CRBN, CRLF2, CSPG4, CTA, CXCL1, CXCR3, Cytosine Deaminase, DCK, DKK1, DLL3, DR3, DR5, EBNA3C, EGF, EGFR5, ELVAL4, EPHA3, EPS8, EVI1, FAIM-3, FasR, FCU1, FLT3, FOLR, FOXM1, FSHR, Galectin-3, GalNAc, GARP, Gelactin-9, Gelatcin-1/3/9, GLD18, GNRHR, GP160, GP73, H3.3K27M, HAGE, HDAC2, HDAC8, HPV16 E6, HPV16 E7, HSP, Hypoxia Pathway, ICAM, ICAM7, IDO1, IFNG, IFNGR2, IGF2R, IGFBP2, IGK@, IL10RA, IL12RB1, IL13, IL13R, IL13Ralpha2, IL15RA, IL17A, IL17B, IL18, ILlA, IL1R1, IL1R3, IL21, IL22R, IL27R, IL2RA, IL35, IL9R, Integrin Beta-7, IRAK1, ITGB5, Kappa Myeloma Antigen, KIR2DL2, Kynurenine, LlCAM, Lambda Myeloma Antigen, LAMP, LLO, LXRA, LXRB, Mas Receptor, MG7, MHCI, MHCII, MIC, MOSPD2, MRP-3, MRP1, MRP3765, muGNTP01, MYB, MYBL2, NFAT, NGcGM3, Nrf2, p38 MAP Kinase, P55, PAM4, PAP, PASD1, PCDH18, PD-L2, PI3K-delta, POTE, PPT, Protein Tolemerase, PTGER2, RANKL, RBL001, RNF43, ROR2, S100A9, SEREX Antigen, SLAMF1, STAT, TACSTD2, TASTD2, TDO2, TEM, Thymidine Kinase, Thymidylate Synthase, TIE2, TIMP3, TM4SF5, TOP1, TRBC1, TRBC2, TRIF, Tryptophan, TSHR, TWEAK, UTA2-1, VDBP, VRP, VSIG-4, XAGE1, XAGE1A, ZP1, or ZP3.

14. The method of claim 1, wherein said subject has received treatment, wherein said treatment comprises a cell therapy, a cancer vaccine, a monoclonal antibody, an antibody-drug conjugate, a tumor infiltrating cell therapy, a chimeric antigen receptor cell therapy, a polyspecific antibody, an organoid, a targeted therapy, an immunotherapy, surgery, a radiotherapy, a chemotherapy, or a stem cell therapy.

15. A method of treating or monitoring a subject having or suspected of having a disease, comprising:
(a) contacting a sample of a subject with a peptide display library comprising a plurality of non-wild type epitopes of antibodies under conditions sufficient to form a complex comprising an antibody from said sample bound to a non-wild type epitope of an antibody from said plurality of non-wild type epitopes of antibodies;
(b) identifying said non-wild type epitope of said antibody; and
(c) using said non-wild type epitope of said antibody identified in (b) to generate an output, or quantify an immune potential, indicative of (i) a diagnosis of said disease, (ii) a predicted response of said subject to a therapeutic for said disease, (iii) a progression or regression of said disease in response to said subject having received said therapeutic, or (iv) autoimmune toxicity or an immune related adverse event in response to said subject having received said therapeutic.

16. The method of claim 15, further comprising comparing said non-wild type epitope of said antibody identified in (b) against an antibody repertoire of an immune response to generate said output or outputs.

17. The method of claim 15, wherein said subject has said disease, wherein said disease is a non-viral disease.

18. The method ofany one of claim 15, wherein said subject has said disease, and wherein said disease is cancer.

19. The method of claim 15, where said cancer is selected from the group consisting of an anaplastic cancer, medullary thyroid cancer, appendiceal cancer, arrhenoblastoma, biliary tract carcinoma, B-cell lymphoma, bladder cancer, breast cancer, cancers of the bile duct, carcinoid tumor, cervical cancer, cholangiocarcinoma, colon cancer, colorectal cancer, craniopharyngioma, endometrial cancer, epithelial intraperitoneal malignancy with malignant ascites, esophageal cancer, Ewing sarcoma, fallopian tube cancer, follicular cancer, gall bladder cancer, gastric cancer, gastrointestinal stromal tumor (GIST), GE-junction cancer, genito-urinary tract cancer, glioma, glioblastoma, head and neck cancer, head and neck squamous cell carcinoma, hepatoblastoma, hepatocarcinoma, hepatocellular carcinoma, Hodkin lymphoma, non-Hodgkin lymphoma, HR+ and HER2+ breast cancer, Hurthle cell cancer, Inflammatory breast cancer, Kaposi sarcoma, kidney cancer, laryngeal cancer, liposarcoma, liver cancer, lung cancer, medulloblastoma, melanoma, Merkel cell carcinoma, microsatellite instability high or DNA mismatch repair deficient solid tumors, neuroblastoma, neuroblastoma, neuroendocrine cancer, non-small cell lung cancer, osteosarcoma (bone cancer), ovarian cancer, ovarian cancer with malignant ascites, pancreatic cancer, pancreatic neuroendocrine tumor, papillary cancer, parathyroid cancer, peritoneal carcinomatosis, peritoneal mesothelioma, primitive neuroectodermal tumor, prostate cancer, renal cell carcinoma, retinoblastoma, rhabdomyosarcoma, salivary gland carcinoma, sarcoma, skin cancer, small cell lung cancer, non-small cell lung cancer, mall intestine cancer, stomach cancer, testicular cancer, thyroid cancer, triple negative breast cancer, urothelial cancer, uterine cancer, uterine serous carcinoma, vaginal cancer, vulvar cancer, and Wilms tumor.

20. The method of claim 15, wherein said cancer is selected from the group consisting of melanoma, B-cell lymphoma, non-small cell lung cancer, bladder cancer, head and neck squamous cell carcinoma, hepatocellular carcinoma, Hodgkin lymphoma, Merkel cell carcinoma, and microsatellite instability high or DNA mismatch repair deficient solid tumors.

21-76. (canceled)
